(19) United States
(12) Patent Application Publication
(10) Pub. No.: US 2008/0145839 A1
(43) Pub. Date: Jun. 19, 2008

(54) Method and Nucleic Acids For the Differentiation of Astrocytoma, Oligoastrocytoma and Oligodenroglioma Tumor Cells

(75) Inventors: Alexander Olek, Berlin (DE); Christian Piepenbrock, Berlin (DE); Kurt Berlin, Stahnsdorf (DE)

Correspondence Address: Davidson, Davidson & Kappel, LLC, 485 7th Avenue, 14th Floor, New York, NY, 10018, US

(73) Assignee: Epigenomics AG, Berlin (DE)

(21) Appl. No.: 10/311,506

(22) PCT Filed: Jul. 2, 2001
(86) PCT No.: PCT/EP01/07539

§ 371 Date: Dec. 16, 2002

(30) Foreign Application Priority Data
Jun. 30, 2000 (DE) 100 32 529.7
Sep. 1, 2000 (DE) 100 43 826.1

(51) Int. Cl. C12Q 1/68; C07H 21/04; C40B 40/06; C40B 50/14

(52) U.S. Cl. 435/6; 536/22.1; 536/24.3; 506/30; 506/16

(57) ABSTRACT

Chemically modified nucleic acid sequences of genomic DNA, oligonucleotides and/or PNA-oligomers for detecting the cytosine methylation state of genomic DNA. In addition, a method for ascertaining genetic and/or epigenetic parameters of genes for the characterization, classification, differentiation, grading, staging, treatment and diagnosis of oligodendrogliomas, astrocytomas and oligoastrocytomas.

### FIELD OF THE INVENTION

[0001] The levels of observation that have been studied by the methodological developments of recent years in molecular biology, are the genes themselves, the translation of these genes into RNA, and the resulting proteins. The question of which gene is switched on at which point in the course of the development of an individual, and how the activation and inhibition of specific genes in specific cells and tissues are controlled is correlatable to the degree and character of the methylation of the genes or of the genome. In this respect, pathogenic conditions may manifest themselves in a changed methylation pattern of individual genes or of the genome.

[0002] The present invention relates to nucleic acids, oligonucleotides, PNA-oligomers and to a method for the characterization, classification, differentiation, grading, staging, treatment and diagnosis of oligodendrogliomas, astrocytomas and oligoastrocytomas, by analysis of the genetic and/or epigenetic parameters of genomic DNA, in particular with its cytosine methylation status.

### PRIOR ART

[0003] The incidence of brain tumors is 6 in 100,000, the majority of which are metastases from other types of cancers. Of the primary tumors, the most common are those arising in the glial cells, the gliomas. The most common of these include the astrocytomas and oligodendromas. Both arise from different forms of supportive brain tissue, the astrocytes and oligodendrocytes respectively.

[0004] These tumors may both develop from retained stem cells, therefore are often found in mixed gliomas, such as oligoastrocytomas. In the case of mixed gliomas, there is no consistent method of prediction of progression of tumors from low grade to anaplastic to malignant. The malignant progression is wholly dependant on the type of cell which predominates. For example, If the tumor is predominantly astrocytic, this could take only 6 months to 5 years. If it is predominantly oligodendroglial, malignant transformation of a “low grade” mixed glioma could occur within 3 to 10 years.

[0005] Initial diagnosis of gliomas is by scan imaging, (e.g. CT, MRI). This may be supplemented by histological and/or cytological analysis of biopsies. The use of molecular markers has been described, for example ‘Cyclooxygenase-2 expression in human gliomas: prognostic significance and molecular correlations.’ High-dimensional mRNA based approaches have recently been shown to be able to provide a better means to distinguish between different tumor types and benign and malignant lesions. Application as a routine diagnostic tool in a clinical environment is however impeded by the extreme instability of mRNA, the rapidly occurring expression changes following certain triggers (e.g. sample collection), and, most importantly, the large amount of mRNA needed for analysis (Lipshutz, R. J. et al., Nature Genetics 21:20-24, 1999; Bowtell, D. D. L. Nature genetics suppl. 21:25-32, 1999), which often cannot be obtained from aroutine biopsy. Shono et al. Cancer Res. 2001 Jun. 1; 61(11):4375-81.

[0006] Aberrant DNA methylation within CpG islands is common in human malignancies leading to abrogation or overexpression of a broad spectrum of genes (Jones, P. A. Cancer Res 65:2463-2467, 1996). Abnormal methylation has also been shown to occur in CpG rich regulatory elements in intronic and coding parts of genes for certain tumours (Chan, M. F., et al., Curr Top Microbiol Immunol 249:75-86, 2000). Highly characteristic DNA methylation patterns could also be shown for breast cancer cell lines (Huang, T. H.-M., et al., Hum Mol Genet. 8:459-470, 1999).

[0007] Abnormal methylation of genes has been linked to gliomas (e.g. Epigenetic silencing of PEG3 gene expression in human glioma cell lines. Maegawa et al. Mol. Carcinog. 2001 May; 31(1):1-9.). It has also been shown that methylation pattern analysis can be correlated with the development of low grade oligoastrocytomas (Aberrant methylation of genes in low-grade oligoastrocytomas. Costello J F, Plass C, Cavenee W K. Brain Tumor Pathol. 2000; 17(2):49-56). However, the techniques used in such studies (restriction landmark genomic scanning, imprinting analysis) are limited to research, they are unsuitable for use in a clinical or diagnostic setting, and do not provide the basis for the development of a medium or high throughput method for the analysis of gliomas.

[0008] 5-methylcytosine is the most frequent covalent base modification in the DNA of eukaryotic cells. It plays a role, for example, in the regulation of transcription, in genetic imprinting, and in tumorigenesis. Therefore, the identification of 5-methylcytosine as a component of genetic information is of considerable interest. However, 5-methylcytosine positions cannot be identified by sequencing since 5-methylcytosine has the same base pairing behavior as cytosine. Moreover, the epigenetic information carried by 5-methylcytosine is completely lost during PCR amplification.

[0009] A relatively new and currently the most frequently used method for analyzing DNA for 5-methylcytosine is based upon the specific reaction of bisulfite with cytosine which, upon sub-sequent alkaline hydrolysis, is converted to uracil which corresponds to thymidine in its base pairing behavior. However, 5-methylcytosine remains unmodified under these conditions. Consequently, the original DNA is converted in such a manner that methylcytosine, which originally could not be distinguished from cytosine by its hybridization behavior, can now be detected as the only remaining cytosine using “normal” molecular biological techniques, for example, by amplification and hybridization or sequencing. All of these techniques are based on base pairing which can now be fully exploited. In terms of sensitivity, the prior art is defined by a method which encloses the DNA to be analyzed in an agarose matrix, thus pre-venting the diffusion and renatuation of the DNA (bisulfite only reacts with single-stranded DNA), and which replaces all precipitation and purification steps with fast dialysis (Olek A, Oswald J, Walter J. A modified and improved method for bisulphite based cytosine methylation analysis. Nucleic Acids Res. 1996 Dec. 15; 24(24):5064-6). Using this method, it is possible to analyze individual cells, which illustrates the potential of the method. However, currently only individual regions of a length of up to approximately 3000 base pairs are analyzed, a global analysis of cells for thousands of possible methylation events is not possible. However, this method cannot reliably analyze very small fragments from small sample quantities either. These are lost through the matrix in spite of the diffusion protection.

[0010] An overview of the further known methods of detecting 5-methylcytosine may be gathered from the following review article: Rein, T., DePamphilis, M. L., Zorbas, H., Nucleic Acids Res. 1998, 26, 2255.

[0011] To date, barring few exceptions (e.g., Zeschnigk M, Lich C, Buiting K, Doerfler W, Horsthemke B. A single-tube PCR test for the diagnosis of Angelman and Prader-Willi syndrome based on allelic methylation differences at the SNRPN locus. Eur J Hum Genet. 1997 Mar.-Apr.; 5(2):948) the bisulfite technique is only used in research. Always, however, short specific fragments of a known gene are amplified subsequent to a bisulfite treatment and either completely sequenced (Olek A, Walter J. The pre-implantation ontogeny of the H19 methylation imprint. Nat Genet. 1997 Nov.; 17(3):275-6) or individual cytosine positions are detected by a primer extension reaction (Gonzalgo M L, Jones P A. Rapid quantitation of methylation differences at specific sites using methylation-sensitive single nucleotide primer extension (Ms-SNuPE). Nucleic Acids Res. 1997 Jun. 15; 25(12):2529-31, WO 95/00669) or by enzymatic digestion (Xiong Z, Laird P W. COBRA: a sensitive and quantitative. DNA methylation assay. Nucleic Acids Res. 1997 Jun. 15; 25(12):2532-4). In addition, detection by hybridization has also been described (Olek et al., WO 99/28498).

[0012] Further publications dealing with the use of the bisulfite technique for methylation detection in individual genes are: Grigg G, Clark S. Sequencing 5-methylcytosine residues in genomic DNA. Bioessays. 1994 Jun.; 16(6):431-6, 431; Zeschnigk M, Schmitz B, Dittrich B, Buiting K, Horsthemke B, Doerfiler W. Imprinted segments in the human genome: different DNA methylation patterns in the Prader-Willi/Angelman syndrome region as determined by the genomic sequencing method. Hum Mol. Genet. 1997 Mar.; 6(3):387-95; Feil R, Charlton J, Bird A P, Walter J, Reik W. Methylation analysis on individual chromosomes: improved protocol for bisulphite genomic sequencing. Nucleic Acids Res. 1994 Feb. 25; 22(4):695-6; Martin V, Ribieras S, Song-Wang X, Rio M C, Dante R. Genomic sequencing indicates a correlation between DNA hypomethylation in the 5′ region of the pS2 gene and its expression in human breast cancer cell lines. Gene. 1995 May 19; 157(1-2):261-4; WO 97/46705, WO 95/15373 and WO 97/45560.

[0013] An overview of the Prior Art in oligomer array manufacturing can be gathered from a special edition of Nature Genetics (Nature Genetics Supplement, Volume 21, January 1999), published in January 1999, and from the literature cited therein.

[0014] Fluorescently labeled probes are often used for the scanning of immobilized DNA arrays. The simple attachment of Cy3 and Cy5 dyes to the 5′-OH of the specific probe are particularly suitable for fluorescence labels. The detection of the fluorescence of the hybridized probes may be carried out, for example via a confocal microscope. Cy3 and Cy5 dyes, besides many others, are commercially available.

[0015] Matrix Assisted Laser Desorption Ionization Mass Spectrometry (MALDI-TOF) is a very efficient development for the analysis of biomolecules (Karas M, Hillenkamp F. Laser desorption ionization of proteins with molecular masses exceeding 10,000 daltons. Anal Chem. 1988 Oct. 15; 60(20):2299-301). An analyte is embedded in a light-absorbing matrix. The matrix is evaporated by a short laser pulse thus transporting the analyte molecule into the vapor phase in an unfragmented manner. The analyte is ionized by collisions with matrix molecules. An applied voltage accelerates the ions into a field-free flight tube. Due to their different masses, the ions are accelerated at different rates. Smaller ions reach the detector sooner than bigger ones.

[0016] MALDI-TOF spectrometry is excellently suited to the analysis of peptides and proteins. The analysis of nucleic acids is somewhat more difficult (Gut I G, Beck S. DNA and Matrix Assisted Laser Desorption Ionization Mass Spectrometry. Current Innovations and Future Trends. 1995, 1; 147-57). The sensitivity to nucleic acids is approximately 100 times worse than to peptides and decreases disproportionally with increasing fragment size. For nucleic acids having a multiply negatively charged backbone, the ionization process via the matrix is considerably less efficient. In MALDI-TOF spectrometry, the selection of the matrix plays an eminently important role. For the desorption of peptides, several very efficient matrixes have been found which produce a very fine crystallization. There are now several responsive matrixes for DNA, however, the difference in sensitivity has not been reduced. The difference in sensitivity can be reduced by chemically modifying the DNA in such a manner that it becomes more similar to a peptide. Phosphorothioate nucleic acids in which the usual phosphates of the backbone are substituted with thiophosphates can be converted into a charge-neutral DNA using simple alkylation chemistry (Gut I G, Beck S. A procedure for selective DNA alkylation and detection by mass spectrometry. Nucleic Acids Res. 1995 Apr. 25; 23(8):1367-73). The coupling of a charge tag to this modified DNA results in an increase in sensitivity to the same level as that found for peptides. A further advantage of charge tagging is the increased stability of the analysis against impurities which make the detection of unmodified substrates considerably more difficult.

[0017] Genomic DNA is obtained from DNA of cell, tissue or other test samples using standard methods. This standard methodology is found in references such as Fritsch and Maniatis eds., Molecular Cloning: A Laboratory Manual, 1989.

### DESCRIPTION

[0018] The object of the present invention is to provide a means for the identification of brain tumor cells. More specifically, the present invention discloses a method and nucleic acids that enable the differentiation of the different cell types within oligoastrocytoma tumors. Identification of cell types is of great prognostic and therapeutic significance as prognosis is dependant upon the predominant cell type. Commonly used histological and cytological methods for such analysis require that tissue samples of an adequate size are available. The present invention is based on the discovery that genetic and epigenetic parameters, in particular, the cytosine methylation pattern of genomic DNA, are particularly suitable for the characterization, classification, differentiation, grading, staging, treatment and diagnosis of oligodendrogliomas, astrocytomas and oligoastrocytomas. Furthermore, the described invention enables the characterization, classification, differentiation, grading, staging, treatment and diagnosis of oligodendrogliomas, astrocytomas and oligoastrocytomas of cancer tissues using minute samples which would be inadequate for routine histological or cytological analysis.

[0019] This objective is achieved according to the present invention using a nucleic acid containing a sequence of at least 18 bases in length of the chemically pretreated genomic DNA according to one of Seq. ID No.1 through Seq. ID No.120.

[0020] The chemically modified nucleic acids (Seq. ID No.1 through Seq. ID No.120) could heretofore not be connected with the determination of genetic and epigenetic parameters.

[0021] The object of the present invention is further achieved by an oligonucleotide or oligomer for detecting the cytosine methylation state of chemically pretreated DNA, containing at least one base sequence having a length of at least 13 nucleotides which hybridizes to a chemically pretreated genomic DNA according to Seq. ID No.1 through Seq. ID No.120. The oligomer probes according to the present invention constitute important and effective tools which, for the first time, make it possible to determine the oligodendroglioma and/or oligoastrocytoma specific genetic and epigenetic parameters of chemically modified genomic DNA. The base sequence of the oligomers preferably contains at least one CpG dinucleotide. The probes may also exist in the form of a PNA (peptide nucleic acid) which has particularly preferred pairing properties. Particularly preferred are oligonucleotides according to the present invention in which the cytosine of the CpG dinucleotide is the 5^{th}-9^{th} nucleotide from the 5′-end of the 13-mer; in the case of PNA-oligomers, it is preferred for the cytosine of the CpG dinucleotide to be the 4^{th}-6^{th} nucleotide from the 5′-end of the 9-mer.

[0022] The oligomers according to the present invention are normally used in so called “sets” which contain at least one oligomer for each of the CpG dinucleotides of the sequences of Seq. ID No.1 through Seq. ID No.120. Preferred is a set which contains at least one oligomer for each of the CpG dinucleotides from one of Seq. ID No.1 through Seq. ID No.120.

[0023] Moreover, the present invention makes available a set of at least two oligonucleotides which can be used as so-called “primer oligonucleotides” for amplifying DNA sequences of one of Seq. ID No.1 through Seq. ID No.120, or segments thereof.

[0024] In the case of the sets of oligonucleotides according to the present invention, it is preferred that at least one oligonucleotide is bound to a solid phase. Moreover it is particularly preferred that all the oligonucleotides of one set are bound to the solid phase.

[0025] The present invention moreover relates to a set of at least 10 n (oligonucleotides and/or PNA-oligomers) used for detecting the cytosine methylation state in chemically pretreated genomic DNA (Seq. ID No.1 through Seq. ID No.120). These probes enable characterization, classification, differentiation, grading, staging, treatment and diagnosis of oligodendrogliomas, astrocytomas and oligoastrocytomas. The set of oligomers may also be used for detecting single nucleotide polymorphisms (SNPs) in chemically pretreated genomic DNA according to one of Seq. ID No.1 through Seq. ID No.120.

[0026] According to the present invention, it is preferred that an arrangement of different oligonucleotides and/or PNA-oligomers (a so-called “array”) made available by the present invention is present in a manner that it is likewise bound to a solid phase. This array of different oligonucleotide- and/or PNA-oligomer sequences can be characterized in that it is arranged on the solid phase in the form of a rectangular or hexagonal lattice. The solid phase surface is preferably composed of silicon, glass, polystyrene, aluminum, steel, iron, copper, nickel, silver, or gold. However, nitrocellulose as well as plastics such as nylon which can exist in the form of pellets or also as resin matrices are possible as well.

[0027] Therefore, a further subject matter of the present invention is a method for manufacturing an array fixed to a carrier material for analysis in connection with characterization, classification, differentiation, grading, staging, treatment and diagnosis of oligodendrogliomas, astrocytomas and oligoastrocytomas, in which method at least one oligomer according to the present invention is coupled to a solid phase. Methods for manufacturing such arrays are known, for example, from U.S. Pat. No. 5,744,305 by means of solid-phase chemistry and photolabile protecting groups.

[0028] A further subject matter of the present invention relates to a DNA chip for the characterization, classification, differentiation, grading, staging, treatment and diagnosis of oligodendrogliomas, astrocytomas and oligoastrocytomas, which contains at least one nucleic acid according to the present invention. DNA chips are known, for example, in U.S. Pat. No. 5,837,832. Moreover, a subject matter of the present invention is a kit which may be composed, for example, of a bisulfite-containing reagent, a set of primer oligonucleotides containing at least two oligonucleotides whose sequences in each case correspond or are complementary to an 16 base long segment of the base sequences specified in the appendix (Seq. ID No.1 through Seq. ID No.120), oligonucleotides and/or PNA-oligomers as well as instructions for carrying out and evaluating the described method. However, a kit along the lines of the present invention can also contain only part of the aforementioned components.

[0029] The present invention also makes available a method for the characterization, classification, differentiation, grading, staging, treatment and diagnosis of oligodendrogliomas, astrocytomas and oligoastrocytomas, by ascertaining genetic and/or epigenetic parameters of genomic DNA by analyzing cytosine methylations and single nucleotide polymorphisms, including the following steps:

[0030] In the first step of the method the genomic DNA sample must be isolated from tissue or cellular sources. Such sources may include cell lines, histological slides, body fluids, for example cerebrospinal fluid or lymphatic fluid, or tissue embedded in paraffin; for example, brain, central nervous system or lymphatic tissue. Extraction may be by means that are standard to one skilled in the art, these include the use of detergent lysates, sonification and vortexing with glass beads. Once the nucleic acids have been extracted the genomic double stranded DNA is used in the analysis.

[0031] In a preferred embodiment the DNA may be cleaved prior to the chemical treatment, this may be any means standard in the state of the art, in particular with restriction endonucleases.

[0032] The genomic DNA sample is then chemically treated in such a manner that cytosine bases which are unmethylated at the 5′-position are converted to uracil, thymine, or another base which is dissimilar to cytosine in terms of hybridization behavior. This will be understood as ‘chemical pretreatment’ hereinafter.

[0033] The above described treatment of genomic DNA is preferably carried out with bisulfite (sulfite, disulfite) and subsequent alkaline hydrolysis which results in the conversion of non-methylated cytosine nucleobases to uracil or to another base which is dissimilar to cytosine in terms of base pairing behavior.

[0034] Fragments of the chemically pretreated DNA are amplified, using sets of primer oligonucleotides according to the present invention, and a, preferably heat-stable polymerase. Because of statistical and practical considerations, preferably more than ten different fragments having a length of 100-2000 base pairs are amplified. The amplification of several DNA segments can be carried out simultaneously in one and the same reaction vessel. Usually, the amplification is carried out by means of a polymerase chain reaction (PCR).

[0035] In a preferred embodiment of the method, the set of primer oligonucleotides includes at least two oligonucleotides whose sequences are each reverse complementary or identical to an at least 18 base-pair long segment of the base sequences specified in the appendix (Seq. ID No.1 through Seq. ID No.120). The primer oligonucleotides are preferably characterized in that they do not contain any CpG dinucleotides. In a particularly preferred embodiment of the method, the sequence of said primer oligonucleotides are designed so as to selectively anneal to and amplify, only the oligoastrocytoma and/or brain tissue specific DNA of interest, thereby minimizing the amplification of background or non relevant DNA. In the context of the present invention, background DNA is taken to mean genomic DNA which does not have a relevant tissue specific methylation pattern, in this case the relevant tissue being brain tissue, more specifically oligodendrocytes, oligodendroglioma, astrocyte, astrocytoma or oligoastrocytoma tissue. Examples of such primers, used in the examples are contained in Table 1.

[0036] According to the present invention, it is preferred that at least one primer oligonucleotide is bonded to a solid phase during amplification. The different oligonucleotide and/or PNA-oligomer sequences can be arranged on a plane solid phase in the form of a rectangular or hexagonal lattice, the solid phase surface preferably being composed of silicon, glass, polystyrene, aluminum, steel, iron, copper, nickel, silver, or gold, it being possible for other materials such as nitrocellulose or plastics to be used as well.

[0037] The fragments obtained by means of the amplification can carry a directly or indirectly detectable label. Preferred are labels in the form of fluorescence labels, radionuclides, or detachable molecule fragments having a typical mass which can be detected in a mass spectrometer, it being preferred that the fragments that are produced have a single positive or negative net charge for better detectability in the mass spectrometer. The detection may be carried out and visualized by means of matrix assisted laser desorption/ionization mass spectrometry (MALDI) or using electron spray mass spectrometry (ESI).

[0038] The amplificates obtained in the second step of the method are subsequently hybridized to an array or a set of oligonucleotides and/or PNA probes. In this context, the hybridization takes place in the manner described in the following. The set of probes used during the hybridization is preferably composed of at least 10 oligonucleotides or PNA-oligomers. In the process, the amplificates serve as probes which hybridize to oligonucleotides previously bonded to a solid phase. The non-hybridized fragments are subsequently removed. Said oligonucleotides contain at least one base sequence having a length of 13 nucleotides which is reverse complementary or identical to a segment of the base sequences specified in the appendix, the segment containing at least one CpG dinucleotide. The cytosine of the CpG dinucleotide is the 5^{th} to 9^{th} nucleotide from the 5′-end of the 13-mer. One oligonucleotide exists for each CpG dinucleotide. Said PNA-oligomers contain at least one base sequence having a length of 9 nucleotides which is reverse complementary or identical to a segment of the base sequences specified in the appendix, the segment containing at least one CpG dinucleotide. The cytosine of the CpG dinucleotide is the 4^{th} to 6^{th} nucleotide seen from the 5′-end of the 9-mer. One oligonucleotide exists for each CpG dinucleotide.

[0039] In the fourth step of the method, the non-hybridized amplificates are removed.

[0040] In the final step of the method, the hybridized amplificates are detected. In this context, it is preferred that labels attached to the amplificates are identifiable at each position of the solid phase at which an oligonucleotide sequence is located.

[0041] According to the present invention, it is preferred that the labels of the amplificates are fluorescence labels, radionuclides, or detachable molecule fragments having a typical mass which can be detected in a mass spectrometer. The mass spectrometer is preferred for the detection of the amplificates, fragments of the amplificates or of probes which are complementary to the amplificates, it being possible for the detection to be carried out and visualized by means of matrix assisted laser desorption/ionization mass spectrometry (MALDI) or using electron spray mass spectrometry (ESI). The produced fragments may have a single positive or negative net charge for better detectability in the mass spectrometer.

[0042] The aforementioned method is preferably used for ascertaining genetic and/or epigenetic parameters of genes used for the characterization, classification, differentiation, grading, staging, treatment and diagnosis of oligodendrogliomas, astrocytomas and oligoastrocytomas.

[0043] The oligomers according to the present invention or arrays thereof as well as a kit according to the present invention are intended to be used for the characterization, classification, differentiation, grading, aging, treatment and diagnosis of oligodendrogliomas, astrocytomas and oligoastrocytomas by analyzing methylation patterns of genomic DNA. According to the pre-sent invention, the method is preferably used for the analysis of important genetic and/or epigenetic parameters within genomic DNA.

[0044] The method according to the present invention is used, for example, for the characterization, classification, differentiation, grading, staging, treatment and diagnosis of oligodendrogliomas, astrocytomas and oligoastrocytomas.

[0045] The nucleic acids according to the present invention of Seq. ID No.1 through Seq. ID No.120 can be used for the characterization, classification, differentiation, grading, staging, treatment and diagnosis of oligodendrogliomas, astrocytomas and oligoastrocytomas.

[0046] The present invention moreover relates to a method for manufacturing a diagnostic reagent and/or therapeutic agent for the characterization, classification, differentiation, grading, staging, treatment and diagnosis of oligodendrogliomas, astrocytomas and oligoastrocytomas by analyzing methylation patterns of genomic DNA, the diagnostic reagent and/or therapeutic agent being characterized in that at least one nucleic acid according to the present invention (sequence IDs 1 through 120) is used for manufacturing it, preferably together with suitable additives and auxiliary agents.

[0047] A further subject matter of the present invention relates to a diagnostic reagent and/or therapeutic agent for the characterization, classification, differentiation, grading, staging, treatment and diagnosis of oligodendrogliomas, astrocytomas and oligoastrocytomas by analyzing methylation patterns of genomic DNA, the diagnostic reagent and/or therapeutic agent containing at least one nucleic acid according to the present invention (sequence IDs 1 through 120), preferably together with suitable additives and auxiliary agents.

[0048] The present invention moreover relates to the diagnosis and/or prognosis of events which are disadvantageous to patients or individuals in which important genetic and/or epigenetic parameters within their genomic DNA, said parameters obtained by means of the present invention, may be compared to another set of genetic and/or epigenetic parameters, the differences serving as the basis for a diagnosis and/or prognosis of events which are disadvantageous to patients or individuals.

[0049] In the context of the present invention the term “hybridization” is to be understood as a bond of an oligonucleotide to a completely complementary sequence along the lines of the Watson-Crick base pairings in the sample DNA, forming a duplex structure.

[0050] The term “functional variants” denotes all DNA sequences which are complementary to a DNA sequence, and which hybridize to the reference sequence under stringent conditions.

[0051] In the context of the present invention, “genetic parameters” are mutations and polymorphisms of genes and sequences further required for their regulation. To be designated as mutations are, in particular, insertions, deletions, point mutations, inversions and polymorphisms and, particularly preferred, SNPs (single nucleotide polymorphisms).

[0052] In the context of the present invention, “epigenetic parameters” are, in particular, cytosine methylations and further chemical modifications of DNA and sequences further required for their regulation. Further epigenetic parameters include, for example, the acetylation of histones which, however, cannot be directly analyzed using the described method but which, in turn, correlates with DNA methylation.

[0053] In the context of the present invention, the term ‘treatment’ is taken to include planning of suitable methods of patient therapy (e.g. surgery, radiation therapy, chemotherapy).

[0054] In the following, the present invention will be explained in greater detail on the basis of the sequences and examples with reference to accompanying figures without being limited thereto.

[0055] FIG. 1

[0056] FIG. 1 shows the hybridisation of fluorescent labelled amplificates to a surface bound oligonucleotide. Sample I being from oligodendroglioma (brain tumor) tissue and sample II being from oligoastrocytoma (brain tumor) tissue. Flourescence at a spot indicates hybridisation of the amplificate to the oligonucleotide. Hybridisation to a CG oligonucleotide denotes methylation at the cytosine position being analysed, hybridisation to a TG oligonucleotide denotes no methylation at the cytosine position being analysed. It can be seen that Sample I was unmethylated for CG positions (as indicated in example (1-3) of the amplificates of the genes TNF-alpha (see figure FIG. 1A), DAPK1 (see figure FIG. 1B), and WT1 (see figure FIG. 1C) whereas in comparison Sample II had a higher degree of methylation at the same position.

[0057] FIG. 2

[0058] Differentiation of oligodendroglyoma (1) and oligoastrocytoma (II). High probability of methylation corresponds to red, uncertainty to black and low probability to green. The labels on the left side of the plot are gene and CpG identifiers. The hybridisation was done with Cy5 labelled amplificates generated by multiplex PCR reactions as shown in Table 1. The labels on the right side give the significance (p-value, T-test) of the difference between the means of the two groups. Each row corresponds to a single CpG and each column to the methylation levels of one sample. CpGs are ordered according to their contribution to the distinction to the differential diagnosis of the two lesions with increasing contribution from top to bottom.

[0059] Seq. ID No.1 through Seq. ID No.120

[0060] Sequences having odd sequence numbers (e.g., Seq. ID No. 1, 3, 5, . . . ) exhibit in each case sequences of chemically pretreated genomic DNAs. Sequences having even sequence numbers (e.g., Seq. ID No. 2, 4, 6, . . . ) exhibit in each case the sequences of chemically pretreated genomic DNAs. Said genomic DNAs are complementary to the genomic DNAs from which the preceeding sequence was derived (e.g., the complementary sequence to the genomic DNA from which Seq. ID No.1 is derived is the genomic sequence from which Seq. ID No.2 is derived, the complementary sequence to the genomic DNA from which Seq. ID No.3 is derived is the sequence from which Seq. ID No.4 is derived, etc.) Seq. ID No.121 through Seq. ID No.132 Seq. ID No.1 through Seq. ID No.120 show sequences of oligonucleotides used in the Examples.

### EXAMPLE 1

### Methylation Analysis of the Gene DAPK1

[0061] The following example relates to a fragment of the gene DAPK1 in which a specific CG-position is to be analyzed for methylation.

[0062] In the first step, a genomic sequence is treated using bisulfite hydrogen sulfite, disulfite) in such a manner that all cytosines which are not methylated at the 5-position of the base are modified in such a manner that a different base is substituted with regard to the base pairing behavior while the cytosines methylated at the 5-position remain unchanged.

[0063] If bisulfite solution is used for the reaction, then an addition takes place at the non-methylated cytosine bases. Moreover, a denaturating reagent or solvent as well as a radical interceptor must be present. A subsequent alkaline hydrolysis then gives rise to the conversion of non-methylated cytosine nucleobases to uracil. The chemically converted DNA is then used for the detection of methylated cytosines. In the second method step, the treated DNA sample is diluted with water or an aqueous solution. Preferably, the DNA is subsequently desulfonated. In the third step of the method, the DNA sample is amplified in a polymerase chain reaction, preferably using a heat-resistant DNA polymerase. In the present case, cytosines of the gene DAPK1 are analyzed. To this end, a defined fragment having a length of 465 bp is amplified with the specific primer oligonucleotides ATTAATATTATGTAAAGTGA (Sequence ID No. 121) and CTTACAACCATTCACCCACA (Sequence ID No. 122). The single gene PCR reaction was performed on a thermocycler (Epperdorf GmbH) using bisulfite DNA 10 ng, primer 6 pmole each, dNTP 200 μM each, 1.5 mM MgCl2 and 1 U HotstartTaq (Qiagen AG). The other conditions were as recommended by the Taq polymerase manufacturer. In the multiplex PCR up to 16 primer pairs were used within the PCR reaction. The multiplex PCR was done according the single gene PCR with the following modifications: primer 0.35 pmole each, dNTP 800 μM each and 4.5 mM MgCl2. The cycle program for single gene PCR and multiplex PCR was as followed: step 1, 14 min 96° C.; step 2, 60 sec 96° C.; step 3, 45 sec 55° C.; step 4, 75 sec 72° C.; step 5, 10 min 72° C.; the step 2 to step 4 were repeated 39 fold.

[0064] The amplificate serves as a sample which hybridizes to an oligonucleotide previously bound to a solid phase, forming a duplex structure, for example AGGAGGACGAGGTGATG (Sequence ID No. 123), the cytosine to be detected being located at position 303 of the amplificate. The detection of the hybridization product is based on Cy3 and Cy5 fluorescently labelled primer oligonucleotides which have been used for the amplification. A hybridization reaction of the amplified DNA with the oligonucleotide takes place only if a methylated cytosine was present at this location in the bisulfite-treated DNA. Thus, the methylation status of the specific cytosine to be analyzed is inferred from the hybridization product.

[0065] In order to verify the methylation status of the position, a sample of the amplificate is further hybridized to another oligonucleotide previously bonded to a solid phase. Said oligonucleotide is identical to the oligonucleotide previously used to analyze the methylation status of the sample, with the exception of the position in question. At the position to be analysed said oligonucleotide comprises a thymine base as opposed to a cytosine base i.e AGGAGGATGAGGTGATG (Sequence ID No. 124). Therefore, the hybridisation reaction only takes place if an unmethylated cytosine was present at the position to be analysed.

### EXAMPLE 2

### Methylation Analysis of the Gene TNFB

[0066] The following example relates to a fragment of the gene TNFB in which a specific CG-position is to be analyzed for methylation.

[0067] In the first step, a genomic sequence is treated using bisulfite (hydrogen sulfite, disulfite) in such a manner that all cytosines which are not methylated at the 5-position of the base are modified in such a manner that a different base is substituted with regard to the base pairing behavior while the cytosines methylated at the 5-position remain unchanged.

[0068] If bisulfite solution is used for the reaction, then an addition takes place at the non-methylated cytosine bases. Moreover, a denaturating reagent or solvent as well as a radical interceptor must be present. A subsequent alkaline hydrolysis then gives rise to the conversion of non-methylated cytosine nucleobases to uracil. The chemically converted DNA is then used for the detection of methylated cytosines. In the second method step, the treated DNA sample is diluted with water or an aqueous solution. Preferably, the DNA is subsequently desulfonated. In the third step of the method, the DNA sample is amplified in a polymerase chain reaction, preferably using a heat-resistant DNA polymerase. In the present case, cytosines of the gene TNFB are analyzed. To this end, a defined fragment having a length of 450 bp is amplified with the specific primer oligonucleotides tttttgtttgattgaaatagtag (Sequence ID 125) and aaaaacccaaaaataaacaa (Sequence ID No. 126). The single gene PCR reaction was performed on a thermocycler (Epperdorf GmbH) using bisulfite DNA 10 ng, primer 6 pmole each, dNTP 200 μM each, 1.5 mM MgCl2 and 1 U HotstartTaq (Qiagen AG). The other conditions were as recommended by the Taq polymerase manufacturer. In the multiplex PCR up to 16 primer pairs were used within the PCR reaction. The multiplex PCR was done according the single gene PCR with the following modifications: primer 0.35 pmole each, dNTP 800 μM each and 4.5 mM MgCl2. The cycle program for single gene PCR and multiplex PCR was as followed: step 1, 14 min 96° C.; step 2, 60 sec 96° C.; step 3, 45 sec 55° C.; step 4, 75 sec 72° C.; step 5, 10 min 72° C.; the step 2 to step 4 were repeated 39 fold.

[0069] The amplificate serves as a sample which hybridizes to an oligonucleotide previously bound to a solid phase, forming a duplex structure, for example AGGGGTTTCGTATAGTAG (Sequence ID No. 127), the cytosine to be detected being located at position 149 of the amplificate. The detection of the hybridization product is based on Cy3 and Cy5 fluorescently labelled primer oligonucleotides which have been used for the amplification. A hybridization reaction of the amplified DNA with the oligonucleotide takes place only if a methylated cytosine was present at this location in the bisulfite-treated DNA. Thus, the methylation status of the specific cytosine to be analyzed is inferred from the hybridization product.

[0070] In order to verify the methylation status of the position, a sample of the amplificate is further hybridized to another oligonucleotide previously bonded to a solid phase. Said oligonucleotide is identical to the oligonucleotide previously used to analyze the methylation status of the sample, with the exception of the position in question. At the position to be analysed said oligonucleotide comprises a thymine base as opposed to a cytosine base i.e. AGGGGTTTTGTATAGTAG (Sequence ID No. 128). Therefore, the hybridisation reaction only takes place if an unmethylated cytosine was present at the position to be analysed.

### EXAMPLE 3

### Methylation Analysis of the Gene CDK4

[0071] The following example relates to a fragment of the gene CDK4 in which a specific CG-position is to be analyzed for methylation. In the first step, a genomic sequence is treated using bisulfite (hydrogen sulfite, disulfite) in such a manner that all cytosines which are not methylated at the 5-position of the base are modified in such a manner that a different base is substituted with regard to the base pairing behavior while the cytosines methylated at the 5-position remain unchanged.

[0072] If bisulfite solution is used for the reaction, then an addition takes place at the non-methylated cytosine bases. Moreover, a denaturating reagent or solvent as well as a radical interceptor must be present. A subsequent alkaline hydrolysis then gives rise to the conversion of non-methylated cytosine nucleobases to uracil. The chemically converted DNA is then used for the detection of methylated cytosines. In the second method step, the treated DNA sample is diluted with water or an aqueous solution. Preferably, the DNA is subsequently desulfonated. In the third step of the method, the DNA sample is amplified in a polymerase chain reaction, preferably using a heat-resistant DNA polymerase. In the present case, cytosines of the gene CDK4 are analyzed. To this end, a defined fragment having a length of 474 bp is amplified with the specific primer oligonucleotides TTTTGGTAGTTGGTTATATG (Sequence ID No. 129) and AAAAATAACACAATAACTCA (Sequence ID No. 130). The single gene PCR reaction was performed on a thermocycler (Eppendorf GmbH) using bisulfite DNA 10 ng, primer 6 pmole each, dNTP 200 μM each, 1.5 mM MgCl2 and 1 U HotstartTaq (Qiagen AG). The other conditions were as recommended by the Taq polymerase manufacturer. In the multiplex PCR up to 16 primer pairs were used within the PCR reaction. The multiplex PCR was done according the single gene PCR with the following modifications: primer 0.35 pmole each, dNTP 800 μM each and 4.5 mM MgCl2. The cycle program for single gene PCR and multiplex PCR was as followed: step 1, 14 min 96° C.; step 2, 60 sec 96° C.; step 3, 45 sec 55° C.; step 4, 75 sec 72° C.; step 5, 10 min 72° C.; the step 2 to step 4 were repeated 39 fold.

[0073] The amplificate serves as a sample which hybridizes to an oligonucleotide previously bound to a solid phase, forming a duplex structure, for example GTATGGGGTCGTAGGAAT (Sequence ID No. 131), the cytosine to be detected being located at position 121 of the amplificate. The detection of the hybridization product is based on Cy3 and Cy5 fluorescently labelled primer oligonucleotides which have been used for the amplification. A hybridization reaction of the amplified DNA with the oligonucleotide takes place only if a methylated cytosine was present at this location in the bisulfite-treated DNA. Thus, the methylation status of the specific cytosine to be analyzed is inferred from the hybridization product.

[0074] In order to verify the methylation status of the position, a sample of the amplificate is further hybridized to another oligonucleotide previously bonded to a solid phase. Said oligonucleotide is identical to the oligonucleotide previously used to analyze the methylation status of the sample, with the exception of the position in question. At the position to be analysed said oligonucleotide comprises a thymine base as opposed to a cytosine base i.e GTATGGGGTTGTAGGAAT (Sequence ID No. 132). Therefore, the hybridisation reaction only takes place if an unmethylated cytosine was present at the position to be analysed.

### EXAMPLE 4

### Differentiation of Oligodendroglyoma and Oligoastrocytoma Tumours

[0075] In order to relate the methylation patterns to a specific tumour type, it is initially required to comparatively analyze the DNA methylation patterns of two groups of patients with alternative forms of a tumor, in this case one group of astrocytoma grade I and another group of astrocytoma grade II, with those of healthy tissue (FIGS. 2 A and B). These analyses were carried out, analogously to Example #. The results obtained in this manner are stored in a database and the CpG dinucleotides which are methylated differently between the two groups are identified. This can be carried out by determining individual CpG methylation rates as can be done, for example, by sequencing, which is a relatively imprecise method of quantifying methylation at a specific CpG, or else, in a very precise manner, by a methylation-sensitive “primer extension reaction”. In a particularly preferred variant, as illustrated in the preceeding examples the methylation status of hundreds or thousands of CpGs may be analysed on an oligomer array. It is also possible for the patterns to be compared, for example, by clustering analyses which can be carried out, for example, by a computer.

[0076] All clinical specimens were obtained at time of surgery, i.e. in a routine clinical situation (Santourlidis, S., Prostate 39:166-174, 1999, Florl, A. R, Br. J. Cancer 80:1312-1321, 1999). A panel of genomic fragments from 56 different genes (listed in Table 1) were bisulphite treated and amplified by 6 sets of multplex PCRs (mPCR) according to Example 1. The MPCR reactions (I,J,K,L,M,N) of the genomic, bisulphite treated DNA was done using the combination of primer pairs as indicated in Table 1. However, as will be obvious to one skilled in the art, it is also possible to use other primers that amplify the genomic, bisulphite treated DNA in an adequate manner. However the primer pairs as listed in Table 1 are particularly preferred. In order to differentiate astrocaytom grade I from healthy control samples optimal results were obtained by including at least 6 CpG dinucleotides, the most informative CpG positions for this discrimination being located within the DAPK1, TNF-alpha, WT1, cFOS and ATP5A1 genes (see figure FIG. 2A, Table 1). Most other CpGs of the panel showed different methylation patterns between the two phenotypes, too. The results prove that methylation fingerprints are capable of providing differential diagnosis of solid malignant tumours and could therefore be applied in a large number clinical situations.

TABLE 1

List of genes, reference numbers and primer oligonucleotides
according to Examples 1-4 and FIGS. 1-2.

| GENE | MPCR | | | |
|---|---|---|---|---|
| ID | SET | GENE | PCR PRIMER | PCR PRIMER |
| 81 | N | ADCYAP1 | GGTGGATTTATGGTTATTTTG | TCCCTCCCTTACCCTTCAAC |
| 292 | K | AFP | AGGTTTATTGAATATTTAGG | AACATATTTCCACAACATCC |
| 85 | L | ANT1 | GTTTAAGGTTGTTTGTGTTATAAAT | CCTCCTCCCAACTACAAAA |
| 48 | L | APOA1 | GTTGGTGGTGGGGGAGGTAG | ACAACCAAAATCTAAACTAA |
| 50 | N | APOC2 | ATGAGTAGAAGAGGTGATAT | CCCTAAATCCCTTTCTTACC |
| 87 | K | AR | GTAGTAGTAGTAGTAAGAGA | ACCCCCTAAATAATTATCCT |
| 1143 | L | ATP5A1 | AGTTTGTTTTAATTTATTGATAGGA | AACAACATCTTTACAATTACTCC |
| 1011 | L | CABL | GGTTGGGAGATTTAATTTTATT | ACCAATCCAAACTTTTCCTT |
| 77 | L | CD1A | ATTATGGTTGGAATTGTAAT | ACAAAAACAACAAACACCCC |
| 1079 | L | CD63 | TGGGAGATATTTAGGATGTGA | CTCACCTAAACTTCCCAAA |
| 99 | M | CDC25A | AGAAGTTGTTTATTGATTGG | AAAATTAAATCCAAACAAAC |
| 187 | L | CDH3 | GTTTAGAAGTTTAAGATTAG | CAAAAACTCAACCTCTATCT |
| 88 | K | CDK4 | TTTTGGTAGTTGGTTATATG | AAAAATAACACAATAACTCA |
| 310 | I | CFOS | TTTTGAGTTTTAGAATTGTTTTTAG | AAAAACCCCCTACTCATCTACTA |
| 1034 | L | CMYC | TTTTGTGTGGAGGGTAGTTG | CCCCAAATAAACAAAATAACC |
| 312 | K | CMYC | TTGTTTTTGTGGAAAAGAGG | TTTCAATCTCAAAACTCAACC |
| 313 | I | CMYC | AAAGGTTTGGAGGTAGGAGT | TTCCTTTCCAAATCCTCTTT |
| 37 | M | CRIP1 | TTTAGGTTTAGGGTTTAGTT | CCACTCCAAAACTAATATCA |
| 70 | N | CSF1 | TAGGGTTTGGAGGGAAAG | AAAAATCACCCTAACCAAAC |
| 78 | M | CSNK2B | GGGGAAATGGAGAAGTGTAA | CTACCAATCCCAAAATAACC |
| 272 | N | CTLA4 | TTTTTATGGAGAGTAGTTGG | TAACTTTACTCACCAATTAC |
| 287 | K | DAD1 | TTTTGTTGTTAGAGTAATTG | ACCTCAATTTCCCCATTCAC |
| 147 | I | DAPK1 | ATTAATATTATGTAAAGTGA | CTTACAACCATTCACCCACA |
| 319 | J | E-CADHERIN | GGGTGAAAGAGTGAGTTTTATTT | ACTCCAAAAACCCATAACTAA |
| 63 | M | EGFR | GGTGTTTGATAAGATTTGAAG | CCCTTACCTTTCTTTTCCT |
| 311 | I | EGFR | GGGTAGTGGGATATTTAGTTTTT | CCAACACTACCCCTCTAA |
| 82 | M | EGR4 | AGGGGGATTGAGTGTTAAGT | CCCAAACATAAACACAAAAT |
| 1012 | L | ELK1 | AAGTGTTTTAGTTTTTAATGGGTA | CAAACCCAAAACTCACCTAT |
| 307 | J | ERBB2 | GAGTGATATTTTTATTTTATGTTTGG | AAAACCCTAACTCAACTACTCAC |
| 308 | K | ERBB2 | GAGTTTGGGAGTTTAAGATTAGT | TCAACTTCACAACTTCATTCTTAT |
| 130 | N | GP1B | GGTGATAGGAGAATAATGTTGG | TCTCCCAACTACAACCAAAC |
| 290.2 | M | HEAT | AGAGGAGATATTTTTTATGG | AAAAATCCTACAACAACTTC |
| | | SHOCK | | |
| 290.3 | J | HEAT | AAGGATAATAATTTGTTGGG | CTTAAATACAAACTTAATCC |
| | | SHOCK | | |
| 89 | I | HUMOS | TTTATTGATTGGGAGTAGGT | CTAATTTTACAAACATCCTA |
| 1083 | N | IL13 | TTTTTAGGGTAGGGGTTGT | CCTTATCCCCCATAACCA |
| 1010 | L | LMYC | AGGTTTGGGTTATTGAGTTT | CATTATTTCCTAACTACCTTATATCTC |
| 291 | L | MC2R | ATATTTGATATGTTGGGTAG | ACCTACTACAAAAAATCATC |
| 314.2 | I | MGMT | AAGGTTTTAGGGAAGAGTGTTT | ACTCCCAATACCTCACAATATAAC |
| 427 | K | MHC | GGGTATTAGGAATTTATGTG | CAAAACACCTTCCTAACTCA |
| 401 | I | MHC | TTGTTGTTTTTAGGGGTTTTGG | TCCTTCCCATTCTCCAAATATC |
| 458 | M | MHC | AAGAGTGAGAAGTAGAGGGTT | CTACTCTCTAAAACTCCAAAC |
| 487 | M | MHC | GAGGTTAAAGGAAGTTTTGGA | AAACTAAATTCTCCCAATACC |
| 465 | L | MHC | ATTGATAGGTAGTTAGATTGG | AAAAAACTCTCATAAATCTCA |
| 451 | M | MHC | AGGAGGAAGGGTTAATAAAGA | ATCTTCCTACTACTATCTCTAAC |
| 441 | M | MHC | AGGTTGGATTTTGGGTAGGT | TCTCCTACTCTCCTAATCTC |
| 160 | M | MLH1 | TTTAAGGTAAGAGAATAGGT | TTAACCCTACTCTTATAACC |
| 94 | N | N33 | TGGAGGAGATATTGTTTTGT | TTTTTCAAATCAAAACCCTACT |
| 302 | J | NF1 | TTGGGAGAAAGGTTAGTTTT | ATACAAACTCCCAATATTCC |
| 1009 | L | NMYC | GGAGGAGTATATTTTGGGTTT | ACAAACCCTACTCCTTACCTC |
| 1018 | N | NUC | AAGTTGTGTTTTTAAAAGGGTTA | AAAAACTAAACCTACCCAATAA |
| 1007 | N | OAT | TGGAGGTGGATTTAGAGGTA | ACCAAAACCCCAAAACAA |
| 304 | J | P16 | AGGGGTTGGTTGGTTATTAG | TAATTCCAATTCCCCTACAA |
| 305 | J | P53 | GTGATAAGGGTTGTGAAGGA | CAAAAACTTACCCAATCCAA |
| 1069 | N | POMC | AGTTTTTAAATAATGGGGAAAT | ACTCTTCTTCCCCTCCTTC |
| 177 | N | PRG | AGTTGAAGTTATAAGGGGTG | AATAAAAACTCTCAAAAACC |
| 26 | K | SOD1 | AGGGGAAGAAAAGGTAAGTT | CCCACTCTAACCCCAAACCA |
| 303 | I | TGF-A | GGTTTGTTTGGGAGGTAAG | CCCCCTAAAAACACAAAA |
| 301 | J | TGF-B1 | GGGGAGTAATATGGATTTGG | CCTTTACTAAACACCTCCCATA |
| 317 | I | TIMP3 | GGTAAGGGTTTTGTGTTGTTT | CCCCCTCAAACCAATAAC |
| 128 | N | TNFB | TTTTTGTTTTTGATTGAAATAGTAG | AAAAACCCCAAAATAAACAA |
| 35 | L | UBB | TTAAGTTATTTTAGGTGGAGTTTA | ACCAAAATCCTACCAATCAC |
| 1140 | N | UNG | GTTGGGGTGTTTGAGGAA | CCTCTCCCCTCTAATTAAACA |
| 300 | J | VEGF | TGGGTAATTTTTAGGTTGTGA | CCCCAAAAACAAATCACTC |
| 188 | K | WT1 | AAAGGGAAATTAAGTGTTGT | TAACTACCCTCAACTTCCC |

The application's sequence listing, which the Patent Office published only in electronic form, follows.

SEQUENCE LISTING (132 sequences)

SEQ ID NO: 1 - DNA, 7001 bp, Artificial Sequence
  chemically treated genomic DNA (Homo sapiens)
tattgttttgttttgttttttagttaataatatattatgagtatatttttattttattaaatatttttttataaagttattttgatggttgtatattattttattttatgaatgtattatattaatttattttttggtgtgggttatttgattttataattttatttttagaataatgaaatatttgtgaagttttagaaaatattggtgtttgggttttaattttatagattttgatttaattggtttgggttatagattaggtattgggaatttaaaaagtttttttagtgattttaatgtgtagttaagatcgggaatttttgtagatagggatgataggaggtgagttatttttagtatttattatttagtattaatattattattttgagttgttaagtgaatgatgtatttgatttattttataaagatatatgtgtaaataaaattattataggatttggtttattagggtttgtgttttaagttttttatgttaagttatatatcgtatattaaatattttaaaatgtattttattgatatatatattaagtgaaaagtgtttttgagttaaataatgatagtataattattaagtaatgataatttgaaatgaatttattattttgtaatttagggataagttatttttttgaattttttgtattttgagagtatttgttatatttgtaagatgaagagtttgaattggttagataatgttttgtgtgtttggtatatgataggtatttaatagttttaaagaattaatgtatttagatgaattgtatattaaatttgttgttttttttttatggttttattaatttaatttgagagaaattaattattttgtaatttagggataagttatgtttttgaatattttgtagtttgaggagaatatttgttatatttgtaaaataaaataagtttgtaagttttttttttttgttttaaagagttttgtgtttttgaatataaaatataaataatcgttatgttgttaattattggtaaatgttttatttttaatttaaggaaatattataaagtaatagatatattaataaaaggttattagttaataggtattgtttgaaaagagtataaaagaattttagtatgattttttatattgtgtttttattattgttaataataaaataattagtaattatgaagtgggtggaattaatttttttaatttttttattaaattttattgaatttagaatattgtatagaaatgaatatggaataggtgagatattttgtgttttttttgttttttttttatattaaaattttttaaattataaaatttgtattaatttgttttgatttattatttatatttattattttatatggagaaaaaatatttaattgatggatatatttaaatgaaagaaaaatttgtaattttataagaggtttataaagttatagtagtgtttaatggatgaatggtttgtatgttttatgttgaattaatttttatattttaatggtatgtatattaattttgaaaaattatatatatatatatatatgtatatatatatgaatataaataaaattttatatgtgaagaagttagaattatgtttttttatataatttttttagattagtaaaatagataaaatttttgtttttaatatagaaaaatgggttattatttgatggtttgaagaagaaatattgtgattgggatatgaatggtaaatcgtagtataattatgtttaaaagaatgtttgaaatatatttttaattatttgatttttaggatagttatagtattatagtatagggaaaaattaaataattggaagataaaatttggattttagtgataggtttattataaattatgtttgttaattttattttttagttttttagtttttttttttttaagtataaaattaagatgtttaggttatttttaatgtttttttaattttgaaattgtatagttttaattgaaatataaatatttatatgtaataatgattatttttttggttgtagttgaaaatacgttttatgaagtttattttgttttttagtttttatattggatttttattaatgtattgtagagataagtttagttgatttgtaagttttgtttatataaatgtattttaaatgtgtaaagtaaggataagtaaatatttaaataaaattgggtatttttgtgagtttttaaaagtataaaagtaatttggataattttaagaaaagttatttatattgaatattaatttgatgttgaagaggttaaattgttgattaatgttttcgatattgattttttgattttttgaaattttatgagttaaattaaattagattttagaaattgaagattagtgtttgattagtgataattatatattaatttaggaattttttttattagtattaatagggtgatattataatgtttttttttttgtatattatttaaattttagtagtaaattataggtgataaaatattttatttgttgttatttgtggagagtatgttagttttttggatgtttttttattttatattttaaaaatttttaataaagaatttaaagtagtgtgttgttgttattttttgtatatttaaatttgtataaggattgttttgagttaatttatgagtattgtagttttgggttttagattttgattatattgggaatagatattgttagaggtttgtttaattattaatttttttttgtttaaatttaaaagtaattataaagaatatagatatttttaattatgggtatattatagtagatggatggttatagaaggagaaattatttttatgggaaatttatttattttagtttttaatatttatatgtatatttatggtaaaagaaaataagaaaaagattaaagtttttttttagatgatttggaagttaattttatataattttataaattaaatgtttaaatagattataatataaatagaaaataaaataaataaatgaaaaattatatttgagaaaaataagtttgttgtaggtttgttttttaaggatttatacgtatttttgttttagggttattatattttttgtttagtttgtttaagaagttatttataaggaagtaagtaaaatggtgaaagatgtattgattgtaattgagaaatttattggagatgaatagtttttagggtgtttagaaaattaggtgagtgaataattttaaaaaagtattgtgatatttgataaaaatttagtatgttgaagagaagatataaaaatagtagtgaaaaatgtatttaaatatttgaagagttattgtatgaaagagggattagatttattttgaattgttaaagagggtagaagagaataataggtagttattataaagagattatataaatatgatgaattaaggttttgaaataagattattttgatgattatgggtatattaatttttttgagttttagtttttttatttgtaaaataagggatgataatagtttttattttatagttagtatggaaattgatataatagtaatagtagttaatttttattatatatataatgtgattggtattattttagggagtataatgtgtatattgataataaaaatattttatgatataggggatagatagtattgatgaattagaatggttgtttagtgagttaagagatgttggttcgggtttttgggtaggatattagttttgtttatttatatttatttattaaatatttaaaataatttttgaagatagatgttaattttttaattgaggaagttgaggtttagagaatttaagtaatttttttatgggaattattaaatggtagagttaggatttgaattagattatttggtttaaaattgatagttttagtagttttattatattataattatagtgaatgtaagatgtatagtatatcgttagggttgttaggtttagtaaataataataaaatataatatttagtttaatttgaattttagataaatattaaatattttttttagtataaggatattttattgtagaagtttaataaataatatttattatttattttattttaatatagaaataaatttgataatgattagaattttttaattataaaataatatgtttagagaatattttgttatggtggggttaattaggtggttgaaagataatgtatttggaatattatagaagagatgtttttttaaggatatagtttaagttttttttaattttgaaatttatgaattgataaaaatttttgttttgtatttttatttttgttttgttttgataatttttttaaaatgtgtataaaaaaataagaatatattatttattgtaattttataattaattagaggtttaaggtaatgttatagatcgttgatttatttttgtaaatttaaaggtatgttttttaaatgaggattgggaattagaaattttacgtaagttttttaggattttttaaatattattgtagtagttataaaagttatataaaagtttttttagatatatgaaatatatgtattttttagatgttttttgtggaatattgatgttgttatttgagtttggtaagggtaagttatagaggaggaaatatatatattttaaaatattttagttaaatatgtaattgtggttaagaaaagtgtttttttaaaaaataattattttattttaaaattatttttatttataattgaaaataatatgtagttttttattgttttgtaaggatggtatgtaaaatgagtatttatgtttgaaatgtggtatgtttgtgtgtgtgtgtgtatatgtatatatgtatgtatatattataatatatatatatgtatttgtaattttaaaagttatatttttaatgagaattatgaaaatattattttgtttagtttttttttttatttaaatttaaatttaaagttttggtgtatacgggtaggatgagtaggtttgttatataggtaaatacgtggtatggtggtttgttgtatttattaatttgttgtttgggtattaagtttagcgtgtattatttattttttttaatgttttttttttttgtattttattttttgataggttttagtgtgtgttgtttttttttttgtgtttatgaaatatggtttatatatttataaaagtttatatattttagtttaaatttttgataatataaaaaggaaaaataaaataatttaaaattgggaaagagaaataaaagattgtatggtttttttttttttattgtttggatattaaagttttattttttataaggtagtaaagaaatttattttattaggttgaaataaaatatattagaatttgtatggaaaattttttagaatttatagttttgattttagatattagaaaatgttttatgtgttttatagatttttaaagtaaagttagttgtttttttttaaatataaaatattttttatagttatttgtttttttggaagaattttgttatgagaaagaaattttggagaagtacggatatttagattgttgtagttaaagtgaagagggaagatataattgtttttttgtatataaaaagtttattttagtatcgattttatttttttaagttttagaatttgttataagttgtgaagtatatgaagaagatagggagatatttatgaataagtaaggatttagtttaaaggtagatgtaaattttagaaatatagtaatggtaagtttaatttagtatttttgtaatgtatttatgtatttttagtaagaggtataatgtttttttggtgttgtgtttgttgaggttttaggtaaggtaattaggagagtaatatttaatgtaatttggtttttatagtacgttagatgtagtataaattataggataaatttattagaggttttattagttttttgagagatatatattttttttttttttttttatttattttatttttaattttattttgtttaagaatatattagtattgtattaaattgatgttttttagagttatatattggtgttttgtgtttatttaattgtttagaaataaaagttagagatttaagtatggttaagtatggttaagatatatagatatggtaaaggtttattgaatatttaggatgttgtggggtcgggcgcggtggtttacgtttgtaattttagtattttgggaggtcgaggcgggcggattacgaggttaggagatcgagattattttggttaatatggtgaaatttcgtttttattaaaaatataaaaaaaattagtcgggcgtgatggtgggcgtttgtagttttagttattcgggaggttgaggtaggagaatggcgtgaattttggaggcggagtttgtagtgagtcgagattgcgttattgtattttcgtttgggttatagagcgagatttcgttttaaaaaaaaaaaaaaaaaaaaaggatgttgtggaaatatgtttgtttgtatagaggattagattaatatttataaataaattttgaagttttttttttttttttttttttatttttttttttttttttattttgttgataggaaattgaaggttggaaggttaaaataattggttaagggtatatagttagtatatttgattttaggtttttttgttggagaagtttgtacgtaattttttaattatttttgttttttatgttattttttaaattagataaatagagagattgtttttagaatatttttgttatggcgattatttaggtgtataattttattttgtattgataagggataaaatgtttatttttttgttgtatttagtagaagtttggttttgttgatttttgaaatatatttgagtaggtttattgaaaaagattttttaataagaattatggttagtatgtttgtttattttttttttataatagaatttggtattatttgttagata

SEQ ID NO: 2 - DNA, 7001 bp, Artificial Sequence
  chemically treated genomic DNA (Homo sapiens)
tatttgatagatggtattagattttattatgagaagaaaataggtagatatgttaattatgatttttattaaaaggttttttttaataagtttatttagatatgttttagggattagtaaagttagatttttgttaagtgtaatagaaagatggatattttattttttgttagtgtagaatggggttatgtatttggatagtcgttatagtagagatgttttaagggtaatttttttatttatttggtttaggaagtaatatggaaggtagaagtgattgaagagttacgtataggtttttttaatagaagaatttggggttaaatgtattagttgtgtgtttttagttagttgttttagttttttaatttttaattttttattaataaaatgggggaaagaagaagaatgaagaggaagaggagaaggaggttttaaagtttgtttgtgagtgttaatttgattttttgtgtaagtagatatgtttttataatattttttttttttttttttttttttgagacggagtttcgttttgtggtttaggcgggagtgtagtggcgtaatttcggtttattgtaagtttcgtttttagggtttacgttatttttttgttttagtttttcgagtagttgggattataggcgtttattattacgttcggttaattttttttgtatttttagtagagacggggttttattatgttagttaggatggtttcgattttttgatttcgtgattcgttcgtttcggttttttaaagtgttgggattataagcgtgagttatcgcgttcggttttataatattttaagtgtttagtaaatttttgttatgtttgtgtattttgattatgtttgattatgtttggatttttaatttttatttttaggtaattaggtgaatataaaatattaatatatggttttggaaagtattaatttggtgtaatattaatatatttttgaataaggtaaaattgagagtagaatgggtaaaaagaaaaaaaaaaggtgtatattttttaagggattaatggaatttttggtaggtttgttttgtggtttgtattatatttagcgtgttatggaaattaagttatattgaatgttgtttttttaattattttgtttgggattttagtagatataatattaaagaaatattatattttttattgggagtatatgagtatattgtaaaaatattaaattaggtttgttattgttgtgtttttgaggtttgtatttatttttaaattggatttttatttgtttatgaatgtttttttgttttttttatatgttttatagtttgtgataggttttggaatttggaaaagtgggatcgatgttggagtgggttttttgtgtgtaagaaaatagttatgttttttttttttattttggttgtagtagtttgaatgttcgtatttttttaaaattttttttttatggtaaagtttttttagaaaggtaggtagttataagaaatattttatgtttggagaaagataattaattttgttttaaaaatttataagatatatgaaatattttttaatgtttaaaattagaattatagattttgaaaaattttttatataaattttaatgtattttgttttagtttgatgaaatagatttttttgttgttttatggaaaatgagattttaatgtttaaataataaaaggaaaaaagttatgtaattttttgttttttttttttaattttgaattattttattttttttttttgtgttattaaaaatttggattaggatatataaatttttataaatatataaattatgttttatggatatagggagggaaatagtatatattggggtttgttagggagtggagtgtagggagggagagtattaggaaaaataggtaatgtacgttgggtttaatatttaggtaataggttggtaggtgtagtaaattattatgttacgtgtttatttatgtaatagatttgtttattttgttcgtgtatattagaattttaaatttaaatttaaataaaaaaagaaattgagtaaaataatatttttatgatttttattaaagatgtaatttttggaattgtaaatatatatgtatatattatggtatatatatatatatatatatatatatatatatatatagatatattatattttagatataaatgtttattttatatgttatttttataagataataaaaaattgtatattatttttaattataaataaaaatgattttgaaatgaaataattattttttaaaaaaatattttttttggttataattatatatttagttaaaatgttttaaaatgtatgtgtttttttttttgtgatttatttttattaaatttagatgatagtattaatattttatagaaagtatttgaggaatatatgtgttttatgtatttgagggaatttttatgtagtttttatagttgttatagtaatatttagagaattttggaaggtttacgtaagatttttaatttttaatttttatttaaaagatatatttttgaatttataagaataaattagcgatttgtaatattattttgaatttttaattggttgtaaagttgtaatagataatgtatttttgtttttttatatatattttgaaaagattattagaataagataaaaatagagatgtaaaatagaaatttttgttaatttataaattttaaagttggaaagaatttaaattatatttttaaaggagtattttttttatgatattttaggtatattgttttttagttatttaattaattttattataatagagtattttttgggtatgttgttttataattggagagttttaattattattaagtttgtttttatgttgagataaaataaataataaatattatttgttgagtttttataatgaaatatttttatattaagaaaagtatttagtgtttatttaaaatttagattgaattgggtattatgttttgttgttgtttgttaaatttggtaattttaacgatgtgttatgtattttatatttattatagttatagtgtaatgaagttattaagattgttaattttaagttagatggtttagtttaaattttggttttgttatttggtggtttttataagaaagttatttaaattttttgagttttagtttttttagttggaagattagtatttatttttaaggattattttaaatgtttaataaataaatataggtaagtaaagttgatattttgtttagaagttcgagttagtattttttgatttattggataattattttgatttattagtgttatttattttttatgttataaaatatttttattattaatatatatattatgttttttagaataatgttagttatattgtgtgtataataaaagttagttattattgttgttatattaatttttatgttaattatgaaatgggagttattattattttttattttatagataagaaaattgaagtttaaaaaagttaatatgtttatagttattaagataattttattttagaattttagtttattatatttatatggtttttttataataattatttattgtttttttttgttttttttagtaatttagaatgaatttaattttttttttatataatagttttttaaatatttaaatgtattttttattgttatttttgtattttttttttagtatgttaaatttttgttaaatattataatgtttttttaaaattatttatttatttggttttttaaatattttgaagattgtttatttttagtgggttttttaattgtagttaatgtattttttattattttgtttatttttttgtaagtggttttttgaataaattgggtaaaaaatatggtagttttgaaataaaaatacgtgtgaatttttaaggaatagatttgtagtaagtttattttttttaagtatagttttttatttgtttgttttgttttttatttatgttgtaatttgtttagatatttgatttgtaaaattatgtaaaattagtttttaggttatttgagaagaaattttagttttttttttgtttttttttgttataaatatatatatagatgttaaaggttaaaataagtggattttttataagagtggtttttttttttgtgattatttatttattgtaatgtatttataattgagggtatttatattttttatggttatttttaaatttaagtaaaaaaaaattggtaattagatagatttttaatagtgtttatttttagtatgattaaggtttaaaatttaagattatagtgtttatggattgatttaaagtaatttttatgtaggtttggatgtgtaaggagtaatagtaatatattattttaaattttttgttagaaatttttaaaatgtggaatggaaagatatttaagagattaatatattttttataaataatagtaaatagaatattttattatttatggtttgttgttaagatttaaatagtatatagaaaagaaaatattataatattattttgttggtattgatgagaaaaatttttgaattagtatatggttgttattgattagatattaatttttagtttttaaaatttgatttggtttgatttatgagattttaaggaattaaaaggttaatgtcgaagatattagttaatagtttaatttttttaatattaagttgatatttagtatgagtaattttttttgaaattgtttaaattgtttttgtgtttttaagagtttataggggtatttaattttatttaagtatttatttatttttgttttatatatttaaagtatatttatataagtaaaatttataggttagttaaatttatttttgtagtatattggtaagaatttaatatggaagttggaaggtaaaataaattttatgaaacgtgtttttaattgtaattaagaaagtaattattgttatatatgaatgtttgtgttttagttagaattgtatagttttagaattaaaagaatattagggataatttaagtattttaattttatatttgaggaaaagaaaattaggaaattaaggaatgaagttaataagtataatttatagtagatttattattaaaatttagattttgttttttagttgtttggtttttttttgtattgtagtgttgtaattgttttgaaagttaaatggttaaaaatatattttaggtatttttttgaatatagttgtattacggtttgttatttatattttagttataatattttttttttagattattaaataatgatttatttttttgtattaaaaataaagattttatttattttattagtttgagggagttatgtgaaggagtataattttggtttttttatatataaaattttatttatatttatatatatgtatatatatgtgtatatatataattttttaaagttaatatgtatattattgaagtgtaaaaattaatttaatatgaaatatataaattatttatttattaaatattgttataattttgtaaattttttgtaaagttataagttttttttttatttaaatatatttattagttaaatattttttttttatgtggaataataaatatgaataataaattaagataaattaatgtaaattttataatttaaaaaattttgatatagagaaaagataagaaaaatataaaatattttatttattttatatttatttttatgtagtgttttggatttagtaaaatttagtaggaaaattaaaaaaattgattttatttattttatggttgttagttattttgttattggtagtggtggaagtataatatggaaaattatgttgaaatttttttatattttttttaggtaatgtttgttaattagtaattttttgttggtatatttgttattttatggtatttttttaggttgaaaatgggatatttgttaataattaatagtatagcggttatttgtattttatgtttaaggatatagagttttttggggtagaaaaaaaaaatttgtaaatttattttattttgtaaatataataaatattttttttaaattatagaatatttaaagatatgatttgtttttaagttgtagaataattaattttttttaaattaagttaatgaagttataaagaaaagatagtagatttggtatgtaatttatttaaatatattaattttttaaaattattaaatgtttattatatgttaggtatataagatattgtttgattaatttagattttttattttgtaaatataataaatatttttaaagtataaaaaatttagagagatgatttgtttttaagttgtagaataataaatttattttaaattattattgtttgataattatgttgttattgtttagtttagaaatattttttatttaatatgtatgttaataaggtatattttaaagtatttagtatgcgatgtatggtttaatatagaaaatttagagtataagttttaataaattaagttttataataattttatttgtatatgtgtttttataaagtgggttaggtgtattatttatttagtaatttaagatgatgatgttaatattaaatgatggatgttaagagtggtttattttttattatttttgtttataagggttttcgattttggttatatattagaattattgggggaattttttgaatttttaatgtttagtttgtaatttagattagttaaattagaatttgtggagttgagatttaggtattagtattttttaaagttttataggtgttttattattttaaaggtaagattataaaattaaataatttatattaggaaataaattaatatggtatatttataaagtagggtgatatatagttattaaaataattttgtggaagaatatttaatgaaatggaaatatgtttataatatattgttaattgaaaaataggataaaataata

SEQ ID NO: 3 - DNA, 3953 bp, Artificial Sequence
  chemically treated genomic DNA (Homo sapiens)
agtaggagggtaggagagaattttgtatagttggttacggtgttttatttaagggtttaatttggggttttattataaaagttgtagtaaaattgttaaaaataggaattattgggggtgggggttttgttttttttgtttagttattattttttttttttaatttttattttggtttatattacgtgtttttagaagaaacgttttgagtaggggttggtatgagattgtttttttttttaggatttatttttttttatgattaggttggtgattttttttttagggtgttagtgttatttattgagtagatgtttggtaggtgtttgttatgtgttagatttagtaggggatagagttttttcgatatagatggattagtatgtttggatataaattgtgaaaggagttgttaatttttttgtgtaaaatttatttttgcggttatcgttaatatttttatatatgttagggtatttagggttaggatttggtaattttgtttaggagtagtcgttttggagatttttaagacgagggaaagaaatgggtggaaataggggtttatattgtgggtttcgtagttattaaatagtttaattcgtggttattgagtgttttgaataatgtttggttggattttgagtttgagtgtgttattaatttagtttgttattgtcgttgttgttgttatgtatttttttattagttttgtttagaaagattttttttttttttaaaatattagtaaagggggtttagattagtttaagttaaatattttgtaataaaatggagtagttattttggtgaataagtatatttagaaaaggaaattgtttgtttggtaagatgttgtttaatagtattttttattttgatgtttcgtagtttttgagttaggaaattgagaagtttttgattagattgtaaaggttgtaggtttcgtaagggtgtaaggttatttttaaagaattagaagttaggtttttcgatttttatttttgttagcgttaaatagtaatcgttgaaggatgtagggtagttgtgagttgtagtttttttataggtaaaaattataagggtaaaatttggtttttagttttatagggatattttaagttgtgaaagtgttttggttataaagaattgcgtaaatgttaaatattaggtttagttataataattattttagtaataaattaaagagaagggtgaaatattggtaagtattttggagtttaattagtaagtttttgagatttttttatgtgttgattgggataaattttattttttaaaagaaaagacgtttttttggttcgagatatttgtgagttgttttagtaggggattagttatttttttattttttaaagttatagatagttgggatggttaagtaggtagtttaggttgatggtttattaaggttatttttttgtttatatagttttatagatatttggggttattttagttttagaaaagatgttttatattttagtaattgtaagttaaggataagtagagagatgtgggattgttgtttttatgtttgttgtagaagttgaggttttagatttgataaagtaagtgtagtgggaataagggaatatattattagaaattgggattttagaaaatagaatagttattgtttattaagtgttaggtatttttttaatagttttgtatatatgtttaaagtttatgtttaaaacgatataaatttattattttatagttatggaggatagaagtttaaaatgggttatattgggttaaaattatggtggtagtagagttgtgtttttggaggttgtagggaaaaatattttgttttttttagtttttagggaagggttgtttatgttttttagtttatggtttttttttagtagttacgagtttgatttttattgttatttttatatttttttttttgattttgaggttattgttttttttttgtataattaaggatttttgtgatgataatgggtttatttggagaatttaggttaattattttatttttaggtttttaattatattagtaaaatttttttttgttatggaaggtagtaaagttataggttttagggatgaggttgtggatatttttggggagcgttattttgtttgttatatagtaatttttgttataatttagggcgatggtatattttattattatttttaattagaaattgatgtgtggggaggtgatgtattataatttatttagggttaggtagttggatttgaatttgtttgatttttagatttgaggttttttggttttagaattttttttgaagtgaaaggtatgaggtcgattattttttgatttggtaaatagagatgttagtttggtttttagtgttagggagttttttggagtgatggtatagggtatatttttgttttgtattttaagtttagagattgggttttaggtttagttttttttttaattttttgagagatgatagtttttgggtaaagtttttttgtgttttttagtttttttatttgtgagatggtggtatggggagaggttggagtgatgttatagttttttttagtttgtattataggttttaggatttaggttttattagtaatttgttgggggaggtttgggttttttaggagaaatttgataagatggtgttgtaaatattaacggatatatagtattttatatttataggttgttttaggggtttttaataattttgattatttttgttttattttgtagatagaaaatcgaggtttagagagattatataatttgtttacgatttttttttagtaagatggaggttaagtgaaatgagaaagtaggttttttgttattttttttgtttagaggttttttttttatattagggttttttaagggttgagatttagttatatttgtgcgtgattaaatataagtgtgaataatgtaaagggagacgtttttaatttaaggggttttaattttgtaatgtaattttgagattatgtttttttttgttaaagttttttttttttgaagtgatggttattgtagatggtgagggttttttggaggcggataatatttttatatgataaaattaaaagttggtagtttcgaattgatttttggagtgttttgaaatgtaagaggttttcgaaattttagtttgggagttacggagggtttttttttttttttaggtttattagtttgggaggtttggagagaggtttggaggatttgttggggattaaagaagagtattggtgggaggatagggcgggggaagggggaggggagtgaagtagtttttttggaatgttggtggtgggggaggtagtttttttggtggaggagttttagcgttttttttttttttttttttgttaatataatggataatggtaattgtttatatatttttatggaggggaaggggatgagtgtagggaatttcgattttattcgggagatttgtaagtttgtagatatttttttttcgtttttattgaatttttgatttttgttttgtagttttcgtagtttgttgtttgtttattttatttgtttagttttagggatagagttgatttttgaatttttaagttttatattgttaggattagtgagtagtaatagggtcggggttgggtttattagttttttagtttagattttggttgtagatataaataggttttgtaagagttggttgtttagagattgcgagaaggaggtgcgttttgttgtttgtttcggttattttggttttttagtttaaggtttaggttttgttttaggtcgggtttttgggtatttgaggttttttttcgttttgtgtttttttttttatttggttgtaatgagtgggggagtacggggtttttgtatgttgaaggtattttatttagttaggtttttttttttttttagg

SEQ ID NO: 4 - DNA, 3953 bp, Artificial Sequence
  chemically treated genomic DNA (Homo sapiens)
tttggaggagaagaagggtttggttgagtggggtgtttttagtatgtagaagtttcgtgtttttttatttattgtagttaggtgaggagaagggtatagagcgggagaagattttaggtatttagaggttcggtttggggtaaggtttgaattttgagttggggagttagagtgatcggggtaggtagtaggacgtatttttttttcgtagtttttaagtagttagtttttgtagggtttatttatgtttgtagttagggtttgggttgggaggttgataagtttagtttcggttttgttgttgtttattggttttggtaatgtggaatttaagagtttaaggattagttttgtttttggggttgggtaaatagagtgggtaaatagtaagttgcgggggttgtagggtaggggttaagggtttagtgggggcgggaggggagtgtttgtaggtttgtaggtttttcgggtggggtcggggttttttgtatttattttttttttttttatgggagtgtgtgggtagttgttattgtttattgtgttggtagaggaggggaggggagggacgttgggatttttttattaaggagattgttttttttattattagtattttagggagattattttattttttttttttttttttcgttttgtttttttattagtgtttttttttagtttttagtaggttttttaggtttttttttaagttttttaaattggtaaatttggggagaggggagagtttttcgtggtttttagattgaggtttcggagattttttgtattttaaaatattttagagattaattcggagttgttaatttttaattttgttatgtaaagatattgttcgtttttaaaaaatttttattatttatagtgattattattttaaaaaggaaaggttttaataaaaaagggtataattttagaattatattatagaattgaagttttttagattgaagacgtttttttttgtattgtttatatttatatttgattacgtataggtgtgattggattttagtttttgggaagttttggtgtggggagaagatttttgggtaaaggaagtggtaggagatttgtttttttattttatttggtttttattttgttggaggaagatcgtgggtaagttatataatttttttgagtttcggttttttatttgtaaaatggggtaagaatggttagggttgttggaggtttttgagatagtttgtgaatgtaaagtgttgtgtgttcgttggtgtttgtagtattattttgttaggttttttttggaaggtttagattttttttagtaggttattgataggatttgagttttagagtttgtgatgtaggttgagaggaattgtgatattattttagtttttttttatgttattattttatagatgaagagattgaagagtatagagggattttgtttagaggttgttattttttagggagttagaagaaaggttggatttagaatttagtttttggatttgggatgtagggtagaaatgtattttgtattattattttaggaaattttttaatattagaaattaggttgatatttttgtttattagattagggagtggtcggttttatgttttttattttagagaagattttggagttagaaaattttaaatttaagggttaggtaggtttaaatttagttgtttgattttggatgagttatgatatattatttttttatatattagtttttgattgaagataatgatagaatatgttatcgttttgagttatggtaggggttattgtgtggtaagtagaataacgttttttaaagatgtttatagttttatttttggaatttgtggttttgttattttttatggtaaaaaaagattttgttagtgtgattaaggatttggagatggggtggttggtttggattttttaggtgggtttattgttattataggggtttttaattatataagagggaggtagtggttttagagttagagaaagagatgtgaggatggtagtggagattagattcgtgattgttggaagggggttatgagttgagggatatgagtaatttttttttagaagttggagaaggtaaagtatttttttttgtagtttttaggagtatagttttgttgttattatgattttagtttagtatgatttattttggatttttgttttttataattgtaagataataaatttgtatcgttttaagtatgaattttgaatatatatgtaaaattgttagaaaggtatttagtatttagtaaatagtaattattttgttttttagaattttagtttttggtaatgtatttttttatttttattatatttgttttattagatttgagattttagtttttgtagtaggtatgaaggtagtagttttatatttttttgtttgtttttgatttgtagttgttgagatatggaatattttttttaggattgaagtggttttagatgtttatgggattgtgtagatagggaggtggttttggtgagttattagtttgggttgtttatttgattattttagttgtttgtagttttagaaagtgggaaggtggttggttttttgttgggatagtttataggtgtttcgggttaagagagcgtttttttttttggggggtagagtttgttttagttagtatatgggggaattttagaagtttattggttggattttaagatatttgttagtgttttatttttttttttggtttgttattaaaatgattgttatggttaaatttagtatttaatatttgcgtagttttttgtggttaaagtatttttataatttagaatatttttataaggttggaggttagattttatttttgtgatttttgtttgtgggaaaattgtagtttatagttgttttgtattttttagcggttattatttagcgttggtaggggtgggaatcgggaggtttggtttttagttttttgagggtggttttgtatttttgcggagtttgtagtttttgtagtttgattagggattttttagttttttggtttagggattgcgaggtattaggatagggggtgttgttgaatagtattttattaagtaggtagtttttttttttaaatatatttatttattagggtggttattttattttattgtaaggtatttggtttaaattagtttaagttttttttattaatattttggaaaggaaggaggtttttttggatagagttgatggaaaaatatataataataataacgataataataaattgggttgatgatatatttagatttagggtttagttaggtattgtttaaggtatttagtggttacgggttggattgtttggtggttgcggggtttatagtgtaggtttttgtttttatttatttttttttttcgttttgggagtttttagagcgattgtttttgaatagggttattaagttttggttttggatgttttgatatgtgtaggagtgttggcggtgatcgtaagagtggattttgtatagaaagattagtaattttttttataatttatgtttaaatatattggtttatttgtatcgggaggattttgttttttgttaggtttggtatataatagatatttgttaaatatttgtttagtgaatggtattggtattttagagggagggttattagtttggttatagggaggagtgggttttgggaggggaggtagttttatattagtttttgtttagaacgttttttttgggagtacgtggtatgagttagaatgagagttagggaggggaggtggtgattgagtaggggagataggatttttatttttagtagtttttatttttggtaattttgttgtagtttttgtgatagagttttaagttagatttttgggtggggtatcgtagttagttatgtaagatttttttttgtttttttgtt

SEQ ID NO: 5 - DNA, 7432 bp, Artificial Sequence
  chemically treated genomic DNA (Homo sapiens)
atttgaagttagagttatttagaggagaaagagttggaattgagaatttaaggaatgtttggaagtgatcgggttcgagtttatttaggaagaaatagaggttggagatatgagattgtgttgttatttttttttattaatttttgggttttattgaggttttattataagtttggttttgtagtttagtgattaggagaaattagatataagataataataatagtaatgattttttttttttttttgagacggagttttgttttttcgtttaggttggattgtagtggcgcgatttcggtttaatgtaagttttattttttaggtttacgttatttttttgttttagtttttcgagtagttaggattataggcgtttgttattacgtttggttaattttttatatttttagtagagatggggttttatcgtgttagttaagatggttttaattttttgatttcgtgattcgtttgtttcggttttttaaagtgttggggttataggtatgagttatcgcgtttggttaatagtaatgatttttgagtatttatattgttagtttttacggtaagagttttttttattttttgttttgttttgttttaagatagagttttgttttgttatttaggttggagtgtagtggtgtgatcgcggtttattgtagtttttatttttcgggtttaagttatttttttgttttagttttttaagtagttgggattataggtacgtattattatttttggttaatttttgtatttttagtagggatagggttttttattatgttggttaggttggttttaaatttttggttttatatgatttgtttatttcggttttttaaagtgttgggattataggcgtgagttattgcgtttttttttgtatttgtttaagtaatatattgaaatatgtattgtgttttttattttatggaggaggaaattgaggttagtaaatgaggttgttatgggaggtggagataggatttgaatttgttttagtgtaggaggtttaagagtttttgtttttttttagggtattgtgtgggagggtgagaaggagggaggtttatagaggtatgatttttgattgttattgttatttgggttttgttttttgaagtttttgttaagcggggaggtggtcgggggagggttttgttttgtgtagttttttttttttcggttcgtagagttgagtatagagggatagaggtacggaatttttagaaatgtttttttttagaaataggttttaggttttgtttgttttgtgtttttgcgtgttggttttggtttgtattgggggtgagaagaagtgggtggagggatgtggggtttatatttggtgggtgtgagtgtggttgtgtgttttgtggttttgtagttacgtgagatatgagtacggagtgtgtgcgttttatggcgtgcgtatgtatgtgcgtgtcggggagtgtgtgtgtcggtggttgagagtgaagtgtgaatgttatattggtataaattgggattatttgtgtgtgtgtacgtgcgtgcgtggaagtgggagtatgtagtcgtggtaaaaaagtgtatgtttgtgtgtatatgtgtatttgtgtgtatttgtttttttgtggggtatgtgtgtgtaaaatatttgagtgtgtggatatgtgtgagggggtgagtgtgtgttggtgtgtacgtttgtgttttgtatatgtatttttttttttttttttgagacggagttttattttgttatttaggttggagtgtagtggtagtagtggtgcgattttggtttattgtattattcgtttattcgttttaagggatttttttgttttagtttttagagtatttgggattatagatatacgttattatgtttggttattttttttttttgagacggagtttcgttttgttatttaggttggagtgtagtggcgtgattttggtttattgtaacgttcgtttttcgggtttacgttatttttttgttttagtttttcgagtagttgggattataggagtttattattacgtttggttaattttttgtatttttattagagacggggtttcgtcgtgttagttaggatggtttttatattttgatttcgtgattcgtttgtttcggttttttaaagtgttaggattataggcgtgagttattgcgtttggttaatgtttggttaatttttttatatttttggtagagatagggttttgttatgttgtttaggttggttttgaaattttgattttaggtgattcgttcgttttggttttttaaagtgttgggattataggtatgagttattacgttcggttatgtattttatgttaaaatgggattatattttagattagtattatttagtagaaatttaaatttttaatatagggttaggtacggtggtttatgtttgtaattttagtattttcggaggtcgaggcgggtggatcgtaaggttaggagatttgagattattttggttaatagatgggtaaaaatttatttttattaaaaatataaaaaattagttatgtatggtggtatgcgtttgtagttttagttattcgggaggttgaggtcggagaattatttgaattcgggaggtagaggttgtagtgagtcgagatcgcgttattgtattttaatttgggtgatagagcgagatttcgtttgaaaaaaaaaaaaaatttaatacgtatgtagataatgtgtaaggtattattttatgtgtatcgtatgtagtaatttttaatttttacgataattttgaggtagatattattatttcgttttataaaaggagaaatagttttggggagataggataagttatcggttaaggtatatagttagttatatgtggttttcgcgtgacggttggtttttgtaggcgaggttttgtttagatgcgtgggtagaaggtttggttcggaaagaggaattgatagtaaggttaagttaatgtttgtttttgggggtagaaagttattttttgttttttttttattgtttatagaggtagtttagatagggtgggggttataggagaacgaagggagaagggggtagtttttgggtagtaaaattaggtggtgaagggaggtattagaggatggtaattagagaggttattagaggggaattataggtagatagggtgataggagggattattgatataaggtgaagagatggtttagtcggacggggtggtttatatttgtaattttagtattttgggagttcgaggtgggtggattatttgaggttaggagttcgaggttttaatatggtaaaattttattttttttaaaaatataaaaattagtcgggtatgatggtagatgtttgtaatttttgttattcgggaggttgaggtaggaaaattgtttgaatttaggaggtggaggttgtaatgagacgagattatgatattgtattttattttgggtaatagagtaagagattgattttgttttataaaaaaaaagaaaaaagaaaaaaaaaaagagatggttgatggttaaagaggggttagcggttaggggatatataagggtaaaggtaggaggtaagaggattggtagggggttgtttttgggttatcgggagcgatataggatgagtatggagggaaagggagaaggggattttagggttttagtttatttaagttgttttttggttttatttagtatgttagttagaggtttaggaaggaattttgagttttttattaaagttaaagatgagtcgttggagtttggtgaggggtaggatgaaggagttgttggagatagtggtgaataggattagagacgggtggtaatggttttggtgagggtgtgttgggttgggtggtgggaggggatttttgggtttgagggaggaggggttggggtttggatttttgagttttagggaggaggaaagggtgggagtggggttgtgatttttaggtttgggaggagtggagggttagagttgagagtaggaatttttaggttatagagaggagcggataaatggggtagagaatatttggggagagttggggtttttattgtgatgtttttttttttgtaggagttcgagtatttttcggggttttatgtagatttattatgacgattatttgagggatttgggttcgtttattaaggtttggtttttcgaatttaaagatagttttttgaagaagatttatagtttgtgttttaggtttgtttgtggggataaggattagggttaaaatgtttataaaagttaggtgtggttgtggcgggtgtttgtagttttagttatttaggaggttgaggtaggatgatggtttgagtttaggagttcgagattagtttgggtaatatagcgagattttttgggggtaaaataaaaagaaaaaaaaaagtttatatttttttaataaataaagttttatttgtgtttttgtttggatttttttttagtgtggttagaaaaaaatttattttattgttttttaggaattaatgagtagaagaggtgatatttgatggggaaggaagagtagggaggtcgggaagggtattaaggaataatattttattgtgggtttgcggagaatgggggattttaaggcgtgttagttttaggagggtgagggtaggagcgtgggtggagttagtaggtttttatgatggtttttattgagagtttcgtttttgttttttataagttttgattttatttttagtgggtatttagtatttttaatttttttatagtttttaatttagtttttgtcggaggcgaatttttagagtgagggttttttgttatttgagagaaggttttttgtgacgtgattttgggggacgttattgttttttttgtttttatttatttttttcgtagttttgttggttaggattttggtttagataaaggatgggggttgtggttgtggagcggaagtgggttttaattattataaattttttttgtgttcgttcggagttggtgaggatagtttgttagagtttggtaagaaagggatttagggtgcggggataggggggcgttagtagggagagggtaaagatcgataaagtaggaattttaagaggtataatattagaagttcgtgttggaattatgattgtgtgtgtgtgtgtgtgtgtgtgtgtgtgtgtgtgtgtgtgtgagagagagagagagggagatggagtttcgttatgtagtttaggttagatttaaatttttgggtttaagtaatttttttgttttagtttttttagtagttgggattataggtgtattattatattttataaattatagaatttagaattgtagattatttgagtttttgtttagagttagggtggttgaggtggggaggattttttgagtttaggagtttgaggatgtagtgagttgtgattttgttatcgtgttttagtttgggtgatagagaaattttatttttaaaaaagagaaagaaaaagggataggtataatggtttatgtttgtaattttagtattttgggaggtcgaggcgggtggattatttgaggttaggagttcgatattagttttattagtatggtgaaatcgtatttatattaaaaatataaaaattggtcgggtgtggtagtatatgtttgtaattttagttattttagaggttgagataggagaattgtttgaatttaggaagcggaggttgtagtgagtttagatcgtgttattgtattttagtttgggtgatagagtaagatttagttttggcggaaaaaaagaatgaaaaaatttaaaaaattaaaaaagaattgtaggttgggcgtggtggtttatatttgtaatttaaacgttttgggaggttaaggtaaacggattatttgatgttaggagttggagattagtttggttaatatggtgaaatttcgtttttattaaaaatataaaaattagataggtatggtggtgtatgtttgtatttttagttatttaggaggttgaggtaggagaatcgttcgaattcggaagatagaggttgcggtgagttaaaattgcgttatcgtattttagtttgggcgagagaataagattttgttttggaaaaaaaaaaagaattgtagattatttgtttgtgtttttttttcggggattagattttattttttttttgtcgtatttttttattttttacgtgtggatgatgatattgtgttttgtgtatgtttttcgttattaaaagtgttttttttatagagtaggtgagaatttagtgaggagatgtagggatatgaggtttgatttagggtagagttttaaggtaatatatttgatttattgtaggtttttaatggtgtttgtagagtatttttttgtattgatttagttttagtaaagggtagaggttttgttgtgttttttgttgggtttagaattgtttaggtgtttaagaaagttttttaggttgggtttagtggtttatatttgtatttttagtattttggggaggtcgagatgggaggatcgtttgagtttaggagttttagattagtttgggtaataaaataagttttttatttttataaaagaataaaaattagtagttgggtatggtggtttatgtttgtaattttagtattttgggaggttaaggtaggtaaattatttgaggttaggagtttaagattagtttggttaatatggtgaaattttatttttattaaaaatataaaaattaggtggggtatagtggtttaagtttgtaattttagtattttgggaggttaaggtgggcggattacgaggttagaagttcgagattagtttggttagtatggtgaaattttatttttattaaaaatataaaatattagtcgggtatggtggtaggtgtttgtgattttagttttttgggaggttgaggtagaagaattgttagaattttggaggtagaggttgtagtgagtcgagaatacgttattgtattttagtttgggtgatagagcgagattttattttaaaaaatacgaaaataaaaattagtcgggtggtggcgggtgtttgtaattttagttattggggaggttgaggtaggagaattgtttgaatttgggaggtgggggttgtagtgagttaagattgtattattgtattttagtttgggtaatagagtgagattttattttaaaaaagaaaaaaataataattaaaatgttaaaattaggagtagaattatagaatgttggaaagtgaggtttaagaagggggttgtgtttaagtttatgtatgggaaatttgattgggatatcgagtttatatagagtaggattttagttttttttattagagtggggcgtgattataggaatagtcgtttttagttagtttgttatatgatatttttttaatgttttagg

SEQ ID NO: 6 - DNA, 7432 bp, Artificial Sequence
  chemically treated genomic DNA (Homo sapiens)
tttggaatattgagggggtgttatgtggtaggttgattggaggcggttgtttttgtggttacgttttattttggtgggggggattgagattttgttttgtgtgagttcggtgttttagttaagttttttatgtatggatttggatatagttttttttttgggttttattttttaatattttgtgattttatttttgattttaatattttaattattattttttttttttttgagatggaattttattttgttgtttaggttggagtgtagtggtgtaattttggtttattgtaatttttattttttaggtttaagtaatttttttgttttagtttttttagtagttgggattataggtattcgttattattcggttgatttttgttttcgtattttttgagatggagtttcgttttgttatttaggttggagtgtagtggcgtgttttcggtttattgtaatttttgtttttagggttttagtaatttttttgttttagttttttaaggagttggaattataagtatttgttattatgttcggttaatattttgtatttttagtagagatggggttttattatgttggttaggttggtttcgaatttttgatttcgtgattcgtttattttggttttttaaagtgttaggattataggtttgagttattgtgttttatttgatttttgtatttttagtagagatggggttttattatgttggttaggttggttttgaatttttaattttaagtgatttgtttgttttggttttttaaagtgttggaattataggtatgagttattatgtttagttgttaatttttatttttttgtagagatgggagatttgttttgttgtttaggttggtttggaatttttgggtttaagcgatttttttatttcggtttttttagggtgttgggagtataggtgtgagttattgagtttagtttagaaggtttttttgagtatttaaatagttttgggtttagtagggaatatagtaaagtttttgttttttgttaaggttgagttagtgtagggaggtgttttgtagatattattaaggatttatagtagattaaatgtgttattttagggttttgttttaagttagattttatgtttttgtatttttttattgagtttttatttgttttatgagagaggtatttttggtgacgaagaatatgtatagggtataatattattatttatacgtaggagatgaggaagtacggtagaaagagggtgagatttgattttcggagaaagaatataagtaaatggtttataattttttttttttttttaagataaggttttgttttttcgtttaggttggagtgcgatggcgtaattttggtttatcgtaatttttgtttttcgggttcgagcgatttttttgttttagttttttgagtaattggaaatataagtatgtattattatgtttgtttaatttttgtatttttagtagagacggggttttattatgttggttaggttggtttttaatttttgatattaagtgattcgtttgttttggttttttaaagcgtttggattataagtgtaagttattacgtttagtttatagtttttttttagttttttaaatttttttatttttttttttcgttaagattgagttttgttttgttatttaggttagagtatagtggtacgatttgggtttattgtaattttcgttttttgggtttaagtaatttttttgttttagtttttggaatagttgggattataggtatatgttattatattcggttaatttttgtatttttagtatagatgcggttttattatgttggtaaggttggtgtcgaatttttgattttaagtgatttattcgtttcggttttttagagtgttgggattataggtatgagttattgtatttattttttttttttttttttttttagaaatggggtttttttgttatttaggttggaatacggtggtaagattatagtttattgtatttttaaatttttgggtttaagggattttttttattttagttattttaattttaagtagaagtttaaatagtttatagttttaaattttgtgatttgtggagtgtggtggtgtatttgtagttttagttattggggaggttgaggtaggaggattgtttgagtttaggagtttgagtttagtttgggttatatagcgagattttattttttttttttttttttttatatatatatatatatatatatatatatatatatatatatatagttatggttttaatacgggtttttaatattgtgttttttaaaatttttgttttatcgatttttgttttttttttgttgacgtttttttgttttcgtattttgagttttttttttattagattttggtaggttgtttttattagtttcggacgggtatagagaggatttatagtggttgagatttattttcgttttatagttataatttttattttttgtttaggttaaagttttggttaatagaattgcggagggggtgggtggggatagaaagggtaatgacgttttttaaggttacgttatagggaatttttttttaagtgatagggaatttttattttgagaattcgttttcgatagaggttgggttgggggttgtggaggggttggaggtgttgggtgtttattgggaatggagttagagtttgtaggagataagggcgaagtttttagtgagggttattatggggatttgttgattttatttacgtttttgtttttatttttttgaaattgatacgttttgaagttttttatttttcgtaagtttataatagggtgttattttttgatatttttttcgatttttttatttttttttttttattaggtgttattttttttatttattgatttttgggaggtagtggggtgggtttttttttggttatattggggaaggatttagatagggatataggtgagattttatttattggagaagtatgaatttttttttttttttttgttttatttttaagagatttcgttgtgttgtttaggttggtttcgaatttttgggtttaagttattattttattttagttttttgagtagttgggattataggtattcgttataattatatttggtttttatgaatattttaattttggtttttgtttttatagataagtttggggtataggttgtgggttttttttaagaggttgtttttggattcgaggaattaggttttggtgagcggatttaggttttttaggtggtcgttatagtaggtttgtatgaagtttcggaaggtgttcgggtttttataggagagaggatattatagtggaggttttagttttttttaggtgttttttgttttatttattcgtttttttttgtgatttaggagtttttgtttttagttttaattttttattttttttagatttaggggttatagttttatttttattttttttttttttttgagatttaggggtttaggttttagtttttttttttttagatttaggagtttttttttattatttagtttagtatatttttattagaattattgttattcgtttttggttttgtttattattgtttttagtagtttttttattttgttttttattaggttttagcgatttatttttagttttggtggggggtttagggtttttttttgggtttttggttggtatgttaggtggaattagagggtaatttgggtaggttgggattttagaatttttttttttttttttttttatgtttattttgtgtcgttttcggtggtttaggggtagttttttgttagtttttttgttttttgtttttatttttatgtgttttttgatcgttaatttttttttaattattagttattttttttttttttttttttttttttttttttatgagatagagttagttttttgttttgttgtttagggtggagtgtagtgttatgatttcgttttattgtaatttttattttttggatttaggtaatttttttgttttagtttttcgagtagtagggattataggtatttgttattatgttcggttaatttttgtatttttagaagagatggggttttgttatgttggggtttcgaatttttgattttaagtgatttatttatttcgggtttttaaaatgttgggattatagatgtgagttatttcgttcggttgggttatttttttattttgtgttagtagttttttttgttattttgtttgtttgtggtttttttttaatggtttttttaattgttattttttgatgtttttttttattatttgattttgttgtttaggaattattttttttttttttcgtttttttgtgatttttattttgtttgagttatttttgtggatagtggagggagagtaggaggtgattttttgtttttaggggtagatattggtttagttttgttgttagttttttttttcgggttagattttttatttacgtatttggataaagtttcgtttatagagattagtcgttacgcgggggttatatgtagttagttgtgtgttttggtcggtgatttattttgtttttttaggattgtttttttttttgtagaacggggtaataatatttattttagggttatcgtgagaattaagagttattatatacgatgtatatggaatggtgttttgtatattgtttatatacgtgttaaatttttttttttttttagacggagtttcgttttgttatttaggttggaatgtagtggcgcgatttcggtttattgtaatttttgtttttcgggtttaagtgatttttcggttttagtttttcgagtagttgggattataggcgtatgttattatgtatggttaattttttgtatttttagtagagatgggtttttatttatttgttagttaggatgattttaaattttttgattttgcgatttattcgtttcggttttcgaaagtgttgggattataggtatgagttatcgtgtttggttttgtattaaaaatttaaatttttattggataatgttgatttagaatatgattttattttaatataaagtatatggtcgggcgtggtggtttatgtttgtaattttagtattttgggaggttaaggcgggcggattatttgaggttaggattttaagattagtttgggtaatatggtaaaattttgtttttattaaaaatataaaaaaattagttaggtattggttaggcgtagtggtttacgtttataattttagtattttggaaggtcgaggtaggcggattacgaggttaggatatggagattattttggttaatacggcgaaatttcgtttttagtaaaaatataaaaaattagttaggcgtggtggtgggtttttgtagttttagttattcgggaggttgaggtaggagaatggcgtgaattcgggaggcggacgttgtagtgagttaagattacgttattgtattttagtttgggtaatagagcgagatttcgttttaaaaaaaaaaaatagttaggtatggtggcgtgtgtttgtagttttaaatattttgaagattgaggtaggagaattttttgaaacgggtaggcggatgatgtagtgagttaagatcgtattattgttattattgtattttagtttgggtgatagagtgagatttcgttttaaaaaaaaaaaaaaaaatgtatatgtaaaatatagacgtatatattagtatatatttatttttttatatatgtttatatatttaaatattttgtatatatatattttatagagagataggtgtatataaatatatatatgtatatagatatgtatttttttattacgattgtatatttttatttttacgtacgtacgtgtatatatatagatgattttagtttgtattaatgtgatatttatattttatttttagttatcgatatatatatttttcgatacgtatatgtatacgtacgttatgaaacgtatatatttcgtatttatgttttacgtggttatagagttataggatatatagttatatttatatttattaggtgtgggttttatatttttttatttatttttttttatttttaatgtaggttaggattagtacgtagaggtatagggtaggtagggtttggagtttgtttttgaggagggatatttttgggggtttcgtgtttttgtttttttgtgtttaattttgcgggtcgggggaggggaggttgtatagagtagggttttttttcggttattttttcgtttggtagagattttagagagtagggtttaggtgatagtggtaattagaggttatgtttttgtgggttttttttttttttatttttttatatagtgttttgagagaagatagaggtttttgagttttttgtattgaggtaggtttaaattttgtttttattttttatgatagttttatttgttggttttagtttttttttttataaagtgggaggtatagtatatattttagtatattatttgaataaatataaagaaaggcgtagtggtttacgtttgtaattttagtattttgggaggtcgaggtgggtagattatatgaggttaggagtttgagattaatttggttaatatggtgaaaaattttgtttttattaaaaatataaaaattagttagaagtagtgatgcgtgtttgtaattttagttatttgggaggttgaggtaggagaatggtttgaattcgggaagtgaaggttgtagtgagtcgcgattatattattgtattttagtttgggtgatagagtaagattttgttttgaaataaaataaaataaaaaatgaagaaagtttttatcgtggagattggtaatataggtgtttaaagattattgttgttggttaggcgcggtggtttatgtttgtaattttaatattttgggaggtcgaggtaggcggattacgaggttaggagattgagattattttggttaatacggtgaaattttatttttattaaaaatatgaaaaattagttaggcgtggtggtaggcgtttgtagttttagttattcgggaggttgaggtaggagaatggcgtgaatttgggaggtggagtttgtattgagtcgagatcgcgttattgtagtttagtttgggcgaaagagtaagatttcgttttagaaaaaaaaaaaagattattgttgttattattattttgtgtttaattttttttagttattgggttgtagggttaggtttgtggtagggttttaatagggtttaagggttgatgagaggaaatagtaatatagttttatgtttttagtttttgtttttttttaggtgggttcgagttcgattatttttaagtattttttgagtttttaattttaatttttttttttttgggtgattttggttttagat

SEQ ID NO: 7 - DNA, 9884 bp, Artificial Sequence
  chemically treated genomic DNA (Homo sapiens)
tcgtttaggttggagtgtagagtgatatgattttggtttattgcgatttttaattttcgtttttaggtttaagtaatttttttgttttattttttttagtagttgggattataggtttgtgttagtatgtagggataatttttttatttttagtagaacggggggttttattacgttgattaggttggttttaaatttttgattttaagtgatttgtttgtttcggttttttaaagagttaggattataggtgtgagttaatatatttagtttaaaatgattttttttttaaaggaaatttattagtaagttaagtttatttattatttattttattttatttttagagatagggttttgttttttcgtttaagttggagtatagtggtgattatagtttattgtaattttgaatttttgggtttaagtaattttttcgttttagtttttttagtagttgggattataggcgtgtattattatatttagttaattttttgtattttttgtagaaagagggttttattatgttgtttaggttgtttttgaatttttggttttaagtgatgtttttatttgggttttttaaagtgttgggattataagtatgaggtattatatttagtttgttttgtttattttttttgttttaaatatatttttgttttggttggatgcggtgttttatatttatatttttagtattttgggaggtcgaggtaggtggattatttgaggttcggagtttaagattagtttgattaatatggtaaaattttatttttattaaaaatataaaaattagttaggtatggtggtacgtgtttgtaattttagttatttgggaggttgaggtaagagaattatttgaattttggaggtagagtttgtagtgagttgagattgagatattgttttttagtttgggcgatagattgagaatttattataaaaaataaaaaaaaataaaaattaaatatatttttgttttgtaattaaattttagataaattggtgtagttttttagtatggggtaaaaaaagttatttttatgttttttgtttatttttattattataaattttataaaatatttttgtaatttttttttttttttgagaggagttttgtgttgttgtttaggttggagtgtagttgagtaatttcggtttattgtaagtttcgtttttcgggtttacgttatttttttgttttagtttttcgagtagttgggattatacggggttcgttattatattcggttaattttttgtatttttagtagagatagtgttttattatgttagttaggatggtttcgattttttgatttcgtgattcgtttattttagttttttaacgtgttgggattataggtatgagttattatgttcggttttttttttttttttagatagaattttattgtgttgtttaagttggagtgtagtggttattgtaatttttattttttaggtttaagtgattttcgtgttttagttttttaaatagttgggattataggtatgtgttattatgtttagttaaagatggggtagggggtgtagggatttcgatatgttggttagatttattttgaatttttgattttaagtgattaatttgttttagttttttaaagtgttgggattataggtgtgagttattatgtcggttaattttgttgttattgttgttgttgttttgagatagttttatttttgtcgcgtatattgaagtgtagaggcgtaattttggtttattgtaatttttatttggtttattgtaatttttattttttggatttaagcgattttttttttttagttttttgagtagttggggttataggtgtgtattattatttttagttaatttttgattttttagtagagacggggttttgttatgttggttaggttggttttgaatttttgattttaggcgatttgtttgttttggttttttaatgtgttaggattatatgcgtgagttattatgttcggttttgttgtttttagaaacgatatttttttttgttagtttgtgaaagttgattgggttatttttgttatttttaattaaaatagtgttaagaggtaaagggaaaaaaaagtatttagggtatataatattgttttaaaaatgtaattatttgtaagtttggttgttgaaattgttcgttataatttaaattagtttttttgtttgtttgttttgagatggagttttattttgtcgtttaggttggaatgtaatggtatgattttggtttattgtaatttttgtttttaggtttatgtgatttttttgttttagttttttaagtagttgggattataggtattcgttaatatatttagttaatttttgtatttttagtagagacggggttttattatgttggttaggttggttttgaatttttgattttaggtgatttattcgtttcggttttttaaagcgttgggattataggcgtgagttatcgtgttcggttgatttaaattagttttatttaattagttgttaaaaataatttgtagtgattttaaggatcgttttatttagttgttattatttgttaattaaaatttgttagttttttaaaattttattagtgataatgaatttttttaaagaataatatataatagttttttttttttgttgtttgttttgatatagggttttgttttgttgtttaggttggagtgtttcggtgtgattatagtttattgtatttttaaatttttgggtttaagtgaattttttattttggttttttaacgtgttgggattataggtatgagttattgtttttggttatattttttttttataaaaataaaatttttaattatttgtttgtttttttgacgtattaaagattattttgtttgtgtgtatgttttgaatggtaattattgttttttaaatgttttaaatttatagatttgtttttgtattttattttatttggatagttttttttttttttttttttttttttttttttttttttttttttttttttttagatggagttttatttttattgtttaggttggaggatagtggtgtaatttggggtttattgtaatttttgtttttcgggttaaagtaatttttttgttttagtttttttagtagttgggattataggtgttcgtttttatgtcgggttaatttttgtatttttagtagagatggggttttgttatgttggttaagttggtttcgaatttttgattttaggtgatttattcgttttagttttttaaagtgttgggattataggcgtgagttattgcgtttggtttggatagtttttttgtatttttgatttttaggagaattgttgttttatttttttatggtttattttgaaaagagtaggatattagagaaaaggatggttaattacgtgtttataagttatgttttaggagatgatttttgtagttcggatatttatttgttttattaaaatttaggttttaggtgtaagttaggatttgggggatggaattgaaaatgtttttttaaacggtgaaaagcgggtttagcgtagaggttgaggaggaaggattatttgaagttaggagttcgagattagtttgggtaatatagagagatttttttttacgttttgtttattatcgtcgtttttataaaaaaattagttaggtatggtggtgggattataggggtataggttgaggttagaggattgttttagtttaggagttttaggttgtaatgaatggtgataaatttattgtatttttttttgggtaatagagtgagattttgttttaaataaaataaaataaataaataaaaaaaaaagaaaagtgaaggtaacgttaataagtgtttattatgatataataatattagtattatatatatatattaattttgtatatattattaaaattttagtatggtaattttgtggagaaaaaaaaaaagtttatttaggtaagtatagaaagtgtttttttattatttttttttgattttaaatgaagaagtagagtttttaatagtatgaattagatgttggtagaggaaaaagcgagttttcgttttattttggtgtaaatttttgattttggataatttttagtaggattggtaatgatttttttaggtttttttgtgattgttgatatattttttttaatttaaagtttcggaatatatgtttaggacgtgtaggtttgttatataggtaaatgtgtgttatggtggtttgttgtaattattattttattatttaggtattaagtttcgtatgtattagttatttattttgatgtttttttttttcggttattaggatttttaaatagtttgttttaatttattgataggatttttttagaatgaatttaaaaaagttgggaatttttaatttgagcgtagatcggattacgtggaacggtgttggtgtttgttaaaaatttagattgtttcgaattttcgatttagagggtttgaagtggggttaagatttgtagattaacgggtttcgtgggaggttttttgttggtggttagtttcggggtttagttgtttattgttgttattcgtgttaaattacggtttaatattatcgatattattaatcgttttggtttttaagatagtcgcgattttagacgggtgaggtttttattttttagtattagatggggtttgggaattgttgtttagtagatttagttatttacgtggttattcggggtaattataaggtcgatttaaaagattaaaataaatgtataacgaatgttaggattaaagtcggaatatatttaattatttattttgaggtttaaatttaaaaatgttatataaaaaaataagtaatttgttaaaaaatgtagagtggcggcgggggcggggggagaggtggtgaacgcgaggggtagtattttcgggttaggtgggtcggttgttttgattttttttgcggttcggttattttgttttagttagttcggaggttgcggttgtagaagtatcgtttgcggagtaattgtaaagatgttgttcgtgcgcgttgttgcggtcgtggttcgcgttttttttcggcgggtcggattggtgagtatcgaaggtcggtatgatgtaggcggtcgggtggggttgtagggtggtggtgcgtcggttcgggcgttttttgtaggagggcgaggggttgtggcgaatgtcgttattttgtattcgtggttttttcggttggatagagtaggcgatataggtgtttttttgttcgttatttgcgtagaggtagaatggtatagggtagatagttaattcgatggtgtttagagatagggttttaagatttttgttttcggttgatagcggttttagaagggggattttgggtgaaggttagggtttgggcgttagtttttcgaggtttgttttgaatcggtgaggtttttttttttcgatttttagggtcgcgtttcgttgaaggttagaaaattgttgttagtttttgttgaagttagttagtggagtttgatattgtgtgaaggttagtaggtttagtattttatttttgtttggagtttagtttagaggaaaggaataaatgaaggtggtttttggaatatttacgtaggtttttttttagtgttgaatacgaaacgatcgtgaaaacgttttgtaggtgtaaagaattattttatgtggttagtattgtgataatagtgaagttggtttttaaattgttttttcggtagagtgtgtgttttgtggtatttggacgtgtttaaagaatttgtttttgagttttttatttggttttgagtaatttttagtgatggagaatttaagtaaaagagaataaggttggaaaatggttgtaaggattaatatttttcgttatttgttttttttgaaattaatatgattttagtgtaaacgtattgatattgatattttttttttgttttaaaagtaattttaatttgaaaggtgaaataaatatgttggttgttttgttgttttaataatcgttggtagtattttgggtttttgttaataaaaaagtatttttaacggtttttatttagtttttatggaaggtagaggttttagaattgatagtgattagtcgtagtattataatttgaaggagaaattgaaggaagttttaggtggttgtaggatttgttgagagagtaaaataagtttatatgttttaatttttggtttttaatttaattttagtatttatttagtttttgtttgtttggtttttttttttttttttttttttgagatggtgtttcgtttagtcgtttaggttggattgtaatggcgtgattttcgtttattgtaattatcgttttttaggattaagtgatttttttattttagtttttcgagtagttgggattataggtattcgtcgttatgttttgttattttttgtagtttttcgtagagacggggttttattatgttggttaggttggttttgaatttttgacgttaggtgattcgttcgtttcggttttttgaagtgttgggattataagtatgagtcgtcgtgttcggtcgtttgttgtcgttgttgttgttgttgtttttaagtaaaattggaattattttgagttttgttttttgtaggaagttgtttattttagaatttttgtaattttattaaaatatatttaaagttaaaataataaaaattgggtattttaaagggaaagatatttatattttgttaatagtggggggggggggttttcggggttttaggttttttttttttttttttttcggggttttaaaaaggaatttttttttaaaaaaaaaaaaaaaaaaaaaaaaagaaagaaaaagaaagaagaaaaaaagaaaagaaaaaagaaattagagtagttggtgaaagtttatttattttttgtataaataggatttagtttggttgtaagtaatagaaaattttaaaataatagtggtttagataaggaagaggtttattttttttttatttataagtttttgattggttattttagggttggtatggttgtttttggggtgaggatttatatttttgtttgtttattttagtggtgtttggtttaatgtttggtatatgatagatttttagtaatatttattgaatgattgaaaaaattattaattaatagaaggatattgaaaaatttttgatatgtagaattaggatgattttttaaagagtgggtttatttttagtgtttttaatagtatgtgcggatgttagttttattttgttagttatagttattgtttttttttttgtttatttaataagtaaaatttggtgttttatttaatttttatttgcgtttttattattagggagagtgtatatttggttatttttttgtaattttttttttataaatggttttgtttttttttttatgttttgtttgtaaatttatatgtatattttaaaatatatatttttgtatatatatacgtgtgtgtgtgtgtgtgtgtgtgtgtaatttatatgttttaatatttagtataggtatgatatagtgagaggtagtttttaggtttttaagtttttgtattggatattttcgggtttgatttttagtttggttttttttaagttaaagaatgtgtgtgttcgtgtttaaattatttagttttttttagttttgtttttttatttgtaaaatgatatatgtatatggattttgaaaatattttatatagttaagtttattgatttaaagttttgtgattttttttattatatttcgaggttttttgtggtttaagttttatttaatatgtgttttatgattgggcgttgtggtttatgtttataattttagtattttgggaggtcgaggtgggataattgtttgagtttaggggtttaagattagtttgggtaatatattgagattttgtttttataaaaaaaattttaaaattagtaaggtatggtggttagtatttgtagttttagataattaggaggttgaggtagaaggattatttgagtttatgcggttgaagttgtagcgagtcgtgattatattattgtattgtaatttggatgatagagtaagacgttgttttattaaaaatattgttttttgagtatgagggtttaagtgttttgatatttgtagaagttagagatttgtgtggatttgtaaaatgaggaggaggtggatttttgtttttagggttttatattttttttaaggaagtaaataaagatgtaggatattaatgggaaatagattgatttatttttttttaggttaaaaagagtggtttatttgtcgggatggtggtttttgtttgtaattttagtattttgggaggttaaggtaggtggattacgaggttaggagattgagatttttttggttaatacggtgaaaatttcgtttttattataaagtagaaaaaaattagttcggtgtggtggtatgtgtttgtagttttagttatttaggaggagaattgtttgaatttgggaggtagaggttgtagtgagtcgagattgtattattgtattttagtttgggtgatagagcgagatttcgttttttaaaaaaaaaaaagtggtttattggggtaagtttttttttttttttttttttttttttttttttagtagagatggggttttattatgttggttaggttggtttttaatttttgattttatatgatttattcgttttggttttttaaagtgttgggattataggtatgagttatcgtgttttgttaatagttgttttttaaaatattgattgttaggtcgggtgtagtggttgacgtttgtaattttagtattttgggaggttaaggtgggtgtattatttgaagttaggagttcgagattaatttggttaatatggcgaaattttgtttttattaaaaataaaaaaattagtcgggtatggtggtggtcgtttgtagttttagttatttaggaggtcgaggtatgagaatcgtttgaatttgggaggtgaaggttgtaatgagttaagatcgtgtttttgtattttagtttgggtgatagaatgagatttcgttttagaaggaaaaaaaaaatgtgtgtgtatatatatatttattgtttagtaaatatatatttatttattgtttagtttgggtaatatgatgaaattttgtttttataaaaaaaataagtataaaaattagtttggttaggtggcgtatttttgtgattttatttattggggaggttgaggtgggaggattatttgagtttaggaagtcgaggttgtagtgagtcgtgattgagttattgtatttcgatttgggtgataagagtgagattttgttttaaaaaagaaaaaaaaataagtcgggtgcggtgtttacgtttatagttttagtattttgggaggttaaggcgggtggattatttgaggttaggagttcgagattagtttggttagtatggtgaaatttcgtttttattaaaaatataaaaaattaatttggtggaggtggcgtatttttgtagttttagttattcgggaggttgagaatcgtttgagattaggaggtggaggatgtagtgagtcgttttaaaaaaataataataataaagtatagattgtattttaaaaatatgcgagtgtttattgtgtattaggagttgtataaaaggtttttatatatattaaaagttatttttttatttgatattttaaataaaatgttttatatgtaattagtatttttattagtattttgattatattaagttggtatttgtttaagtttgtaagttttataaaggttttgttaaaaattaaatttttaagaatatttttgtattagg

SEQ ID NO: 8 - DNA, 9884 bp, Artificial Sequence
  chemically treated genomic DNA (Homo sapiens)
tttagtgtaaaagtatttttaaaaatttgatttttaataaagtttttataaaatttataagtttaaataaatgttagtttagtgtgattaaagtattggtgaaaatgttaattatatataaagtattttgtttaaaatgttaaatgggaaagtagtttttgatatatgtgaaaattttttatatagtttttagtatatagtaaatattcgtatatttttaaaatgtagtttgtattttattattattgtttttttgagacggtttattgtattttttattttttagttttaagcgatttttagtttttcgagtagttgggattataggggtgcgttatttttattaggttaattttttatatttttagtagagacggggttttattatgttggttaggttggtttcgaatttttgattttaagtgatttattcgttttggttttttaaagtgttagaattataggcgtgagtatcgtattcggtttattttttttttttttttgggatagggttttatttttgttatttaggtcggagtgtagtggtttaattacggtttattatagtttcgattttttgggtttaggtgatttttttattttagtttttttagtaggtgggattataggagtgcgttatttggttaggttaatttttgtatttattttttttatagagataggattttattatattgtttagattgggtagtaaataaatatatatttattgggtagtaaatatatatatatatatatattttttttttttttttgagacggagttttattttgttatttaagttggagtgtaggggtacgattttggtttattgtaatttttattttttaggtttaagcgatttttatgtttcggttttttgagtagttgggattataggcgattattattatgttcggttaatttttttatttttagtagagatagggtttcgttatgttggttaggttgatttcgaatttttgattttaggtgatgtatttattttggttttttaaagtgttggaattatagacgttagttattgtattcggtttggtagttagtattttaaaaagtaattattggtagggtacggtggtttatgtttgtaattttagtattttgggaggttaaggcgggtggattatgtgaggttaggagttggagattagtttggttaatatggtgaaattttatttttattaaaaagaaaaagaaaaagaaaaagaaaaagaaatttgttttagtaaattatttttttttttttgggaaacggagtttcgttttgttatttaggttggagtgtagtggtgtagtttcggtttattgtaatttttgttttttaggtttaagtaattttttttttgagtagttgggattataggtatatgttattatatcgggttaatttttttttattttatagtagagacggggtttttatcgtgttagttaggaaggttttaattttttgatttcgtgatttatttgttttggttttttaaagtgttgggattataggtaggagttattatttcggtaggtaaattattttttttagtttgaaggagagtaggttagtttgttttttattagtgttttatatttttgtttgtttttttaagaagaatgtaggattttgagggtaggaatttattttttttttattttgtaggtttatataggtttttgatttttgtaaatgttagaatatttaagtttttatatttaaaagatagtatttttagtgagatagcgttttgttttgttatttaggttgtagtgtagtggtgtaattacggttcgttgtagttttaatcgtatggatttaagtgatttttttgttttagttttttgattatttgggattgtaggtattggttattatgttttgttaattttaaaattttttttgtagagatagggttttaatatgttgtttaggttggttttgaatttttggatttaagtaattgttttatttcggttttttaaagtattaggattataggtatgagttatagcgtttaattataagatatatattgagtaaaatttggattatagaaaatttcgaagtgtaatagaagaaattataaaattttagattaataaatttgattgtataaagtgtttttaaaatttatatatatatattattttatagatgaggaggtaaagttgaggaaagttgaataatttgaatacgggtatatatattttttggtttgaaaggagttaaattgggaattaaattcgggaatgtttagtgtaaaagtttgagggtttgaggattgttttttattgtgttatgtttatattggatgttagaatatgtgaattatatatatatatatatatatatatacgtgtatatatataaaaatatatattttaaaatatgtatataaatttataagtaaagtatgaggaagaaaataaaattatttgtaaaagaggaattataagaaaataattaaatgtgtattttttttggtgataaaaacgtaaatgaaagttgaataaggtattaagttttgtttattgaatgagtagaaaaaaagataatagttatgattgatagagtgaaattagtattcgtatatattattgggaatattgagaataggtttattttttaggaaattattttggttttatatattaaaagttttttaatgtttttttgttagttaatggtttttttagttatttagtaggtattattgagaatttgttatgtgttaggtattgaattaggtattattggagtaagtagataggagtgtgggtttttattttaagggtagttatgttagttttggaatgattaattaggggtttgtagatgagagagaaataaattttttttttgtttaggttattgttgttttggggttttttattatttgtagttaaattgaattttatttatatagaaggtaagtgagtttttattagttgttttggttttttttttttttttttttttttttttttttttttttttttttttttttttttttttttttttttgaaaaaaaatttttttttggggtttcggggggggggggggggggggatttggggtttcgggaattttttttttttattgttaataaaatgtaagtgtttttttttttaaggtatttaatttttattattttgattttagatgtattttaatggagttgtaggaattttaagataaatagttttttataaggggtaaaatttaaagtagttttaattttatttaaaaataataataataataacgataataagcggtcgggtacgacggtttatgtttgtaattttagtattttagaaggtcgaggcgagcggattatttgacgttaggagtttaagattagtttagttaatatggtgaaatttcgtttttacgaaaaattataaaaagtagtagggtatgacggcgggtgtttgtaattttagttattcgggaggttgaggtgggagaattatttgattttgggaggcggtggttgtagtgggcggagattacgttattgtaatttagtttgggcgattgagcgagatattattttaaaaaaaaaaaaaaaaaaaaaaattaggtaaataaaaattgaataaatgttagagttagattagaaattaagagttggggtatgtggatttattttatttttttaataaattttgtagttatttggaattttttttagttttttttttaagttgtaatattgcgattggttattgttaattttgaagtttttattttttataggagttagatgaaaatcgttaaaaatgtttttttgttaatagaaatttaagatgttattagcggttgttaaggtagtaaaatagttaatatgtttattttattttttaaattgagattatttttagaataaaaaaaaagtgttagtgttaatgcgtttatattgaaattatgttaattttaagggaaataaataacgaagggtattaatttttatagttattttttaattttgtttttttttatttgaattttttattattaaaaattatttaaaattaggtggaaaatttaaggataaattttttaaatacgtttaagtgttataaagtatatattttgtcggagagataatttagaaattagttttattgttgttatagtgttggttatatgaaatggttttttgtatttgtaggacgtttttacggtcgtttcgtatttagtattaagagaaagtttacgtaagtattttaaaaattatttttatttattttttttttttaaattgagttttaggtagaggtgaaatgttgggtttgttgatttttatataatgttagattttattgattagttttaataagagttgatagtagttttttgatttttagcgggacgcgattttaagaatcgaaagagaggaattttatcgatttagaataggtttcggagagttagcgtttaagttttgatttttatttaagattttttttttagggtcgttgttagtcgaagataggaattttgaggttttgtttttggatattatcgagttaattgtttgttttgtattattttgtttttgcgtaggtgacgagtaaaagggtatttgtgtcgtttgttttgtttagtcggagaagttacgggtgtaagatggcggtattcgttatagtttttcgtttttttgtagagagcgttcgagtcggcgtattattattttgtagttttattcggtcgtttgtattatgtcggttttcggtgtttattagttcggttcgtcgaggaagggcgcggattacggtcgtagtaacgcgtacggatagtatttttgtagttatttcgtaggcggtatttttgtagtcgtagttttcggattgattgggataaaatggtcgagtcgtaaagaaggttaagatagtcggtttatttgattcggaagtattgtttttcgcgtttattattttttttttcgttttcgtcgttattttgtattttttggtaggttatttatttttttatgtaatatttttaagtttaaattttaaaatgaatgattagatatatttcggttttggttttggtattcgttatatatttattttggttttttgagtcgattttgtggttgtttcgggtgattacgtgggtagttgaatttgttaagtagtagtttttaggttttatttggtgttagaggatgagggttttattcgtttggggtcgcggttgttttgaggattagggcgattaatagtgtcggtagtgttagatcgtggtttagtacgagtagtaatagtgaatagttaaatttcgggattggttattagtagggagttttttacggagttcgttaatttgtagattttagttttattttagattttttgagtcgaaaattcggggtaatttgaatttttaataaatattagtatcgttttacgtgattcgatttgcgtttaggttaaagatttttagtttttttagatttattttaaaagaattttgttagtgaattagagtaaattgtttaaaaattttgataatcgggggaggggagtattaagataaatagttaatatatgcggagtttaatatttaggtgatgggatgatagttatagtaaattattatggtatatatttatttgtgtaataaatttgtacgttttggatatgtatttcggaattttaaattaaaaaaaatatattaataattataaggaggtttagaagagttattgttaattttattgagaattgtttagaattagaagtttatattaggataggacgaggattcgtttttttttttgttaatatttagtttatgttattgggaattttgtttttttatttggagttaaagggagatgatgaaaaaatattttttatgtttatttggatgggttttttttttttttttatagaattattatattgagattttggtgatatatgtaagattggtgtgtgtgtgtgatgttggtattattatgttatagtggatatttattaacgttgtttttattttttttttttttttatttatttattttattttatttaagatagggttttattttgttgtttaggaaagagtgtagtgggtttattattatttattgtagtttggaatttttgggttggagtaattttttgattttagtttgtgtttttgtggttttattattatgtttggttaatttttttgtaaagacggcggtggtgggtagggcgtggggggaggtttttttatgttgtttaggttggtttcgaatttttggttttaagtgattttttttttttagtttttgcgttgggttcgttttttatcgtttggagaagtatttttagttttattttttaaattttggtttatatttagaatttgaattttggtgaggtaaataaatattcgggttataagggttattttttgaaatatggtttgtaaatacgtgattagttatttttttttttagtattttattttttttaaggtaagttatgggaaaatagagtagtagtttttttgggaattaggggtataaaaaggttgtttaagttaggcgtagtggtttacgtttgtaattttagtattttgggaggttgaggcgggtggattatttgaggttaggagttcgagattagtttggttaatatggtaaaattttatttttattaaaaatataaaaattagttcggtatgggggcgggtatttgtaattttagttattggggaggttgaggtaggagaattgttttaattcgggaggtagaagttgtagtgagttttagattgtattattgttttttagtttgggtaataaaagtgaaattttatttaaaaaaaaaaaaaaaaaaaaagaaagaaaaaaagaaaagaaaaagaaaaaggttgtttaagtaaaataaaatatagagataaatttataaatttaaaatatttgggaagtaataattgttatttagggtatatatataaatagggtggtttttggtacgttagaagaataaatagatggttagaggttttatttttgtaaaagagaaatatagttaggaatagtggtttatgtttgtaattttaatacgttgggaagttaagatgagaggtttatttgagtttaggagtttgggagtgtagtgagttgtgattatatcggaatattttagtttgggtaataaagtaagattttatattaaaataaataataaaaaaagagaattgttgtatattgttttttaagaaagtttattgttattagtaaggttttggggagttggtaagttttgattggtaagtaatggtaattaggtaaaacgatttttagagttattgtaggttgtttttagtagttaattagataaaattggtttaggttagtcgggtacggtggtttacgtttgtaattttagcgttttgggaggtcgaggcgggtggattatttgaggttaggagtttaagattagtttgattaatatgatgaaatttcgtttttgttaaaaatataaaaattggttgggtatgttggcgggtgtttgtaattttagttatttgggaggttgaggtaggagaattatatgaatttggaggtagaggttgtagtgagttaaaattatgttattgtattttagtttgggcgatagagtgagattttattttaaaataaataaataaaaaaattggtttaggttatagcgggtagttttagtagttaggtttatagataattatatttttggagtaatgttatgtgttttgagtgtttttttttttttttattttttgatattgttttagttggggatgataagaatgatttaattaatttttataagttaataggaaaaaatatcgtttttaaaaataataaggtcgggtatggtggtttacgtatgtaattttagtatattgggaggttaaggtaggtagatcgtttgaggttaggagtttaagattagtttggttaatatggtaaaatttcgtttttattaaaaaattaaaaattagttgggggtggtggtgtatatttgtaattttagttatttaggaggttgaggaaggagaatcgtttgaatttaggaggtgaaggttgtagtgagttaggtggaggttgtagtgagttaagattgcgtttttgtattttagtatgcgcgataggagtgagattattttaaaataataataataataataataaaattagtcggtatggtggtttatatttgtaattttagtattttgggaggttgaagtaggttgattatttgaagttaggagtttaagatgagtttggttaatatatcgagatttttgtattttttgttttatttttagttgggtatggtggtatatgtttgtaattttagttatttaggaggttgaggtacgagaattatttaaatttgggagatggaggttgtagtgattattgtattttagtttgggtaatatagtgagattttgtttgaaaaaaaaaaaaaggtcgggtatggtggtttatgtttgtaattttagtacgttgggaggttgaggtgggcggattacgaggttaggagatcgagattattttggttaatatggtgaaatattgtttttattaaaagtataaaaaattagtcgggtgtggtggcgggtttcgtgtagttttagttattcgggaggttgaggtaggagaatggcgtgaattcgggaggcggagtttgtagtaagtcgagattgtttaattgtattttagtttaggtaatagtataagattttttttaaaaaaaaaaaaaaattgtagggatattttgtaaaatttgtagtgataaaagtggataaaagatataaagataattttttttgttttatattgaagggttgtattagtttatttgaaatttggttatagagtagagatatatttagtttttgtttttttttgttttttgtggtggatttttaatttgtcgtttaggttggagagtagtgttttaattttagtttattgtaaattttgtttttagggtttaagtgatttttttgttttagttttttaagtggttgggattataggtacgtgttattatgtttggttaatttttgtatttttagtagagatggggttttgttatgttggttaggttggttttgaatttcggattttaggtgatttatttgtttcggttttttaaagtgttgagaatataggtgtgaggtatcgtatttagttagagtagagatatgtttgaagtaaaaagaataagtaagataggttgggtgtggtgttttatgtttgtaattttagtattttgagaggtttaagtgggagtattatttggggttaggagtttaaaaatagtttgggtaatatagtgagattttttttttataaaaaatataaaaagttagttgggtgtggtggtgtacgtttatagttttagttattaaggaggttgaagcgggaggattgtttgagtttaggagtttaaggttgtagtgaattgtgattattattatattttagtttggacgaaagagtaagattttgtttttaaaaataaaataaaataaataataaataagtttggtttgttagtaagttttttttgaaaagaaaattattttaggttgggtgtgttggtttatatttgtaattttagttttttgagaggtcgaggtaggtagattatttgaggttaggagtttgagattagtttgattaacgtggtgaaatttttcgttttattaaaaataaaaaaattatttttgtatgttagtataagtttgtaattttagttattagagaggatgagataggagaattgtttgagtttggggacgggggttggaggtcgtagtgagttaagattatgttattttgtattttagtttaagcga

SEQ ID NO: 9 - DNA, 4001 bp, Artificial Sequence
  chemically treated genomic DNA (Homo sapiens)
tatggaaagtgtaaatagtgttcggtgtaaagtaggagttgtgataagtggatttttttttagaaatgggatttcgggttaggagtagtggtttacgtttgtaattttattattttgggaggttaaggtgggtggatcgtttgaggttaggagttcgagattagtttggttaatatggtgaaattttgtttttattaaaaatataaaaattaggtacgtgtgatggtgtatgtttgtaattttagttattcgggaggttgaggtaggagaatcgtttgaattcgggaggtgaaggttgtagtgagttgaaattttgttattgtatcgtagtttgggcgataagagtaaaattttatttgaaaaaaaaaaaaaggaaagaaagaaggaaagagaaggaaagaaagaaggaaagagaaaggaaggaaagaaagaaagaggaaaaaaggaaaggaaaaggaaaaagaaaagaaagaaaaggaaggaaagggagaaatgggatgtttgttaggtgtagcgttttggggaggcgtggagagtttataatagggattaaggtgttttttagtcgtagaatatggattatttgttaggtgtggttttggtatatttaggttattggttttgtcgatttgttaaatttaattatttgggtattttttcggttaatatagaggatgtttttatgtgaatacgtgtttatttgtgaaatgtttataatgttaaaggttcgttttggggtaaatatttgatagcgtttggtaaatttaataaatgttttttttgtaatgagtaagttttttaatgtttaaagaaatagttgaattcgttagtaatatgtcggatgttttttttatgtttgtatattttttcgttagtttttttttttttttttttttgagacggagtttcgtttttgttgtttaggttagagtgtaatggtgttatttcgttttatcgtaatttttatttttcgggtttaagcgagttttttgttttaacgttttgagtagttgggattataggtatgtgttattacgtttggttaattttgtatttttagtagagacggggtttttttatgttggttaggttggtttcgaattttcgattttaggtgattcgttcgtttcggttttttaaagtgttgggattatcggcgtgagttatcgcgttcggttcgttagttttaatatttatgttttttggagggtgaagggtttgaaaggtattaaaaattttggtttttaggagcgagttaaatttttttttttagagattgaaggaggttattcgatttcgtttttaggaaaatttaattcgtaatttttttttcgttttggtttttttaggttttattattcgcgtcggggagacgcggttcggtttacgttaggtcggtaagaatttattaggttttaggagggcggggtcgagttttagaagtcggggttcgggttaggagttttggtgtaggcggattcgggcgcgtgttatgggattataattttcggtacgtatcgcggattgcgtcgaatacggttggttgggagatttaattttattgtttttatcggttaatgggacggaggaaagaggtttgattcggattttcggaggttaatggtaatatagaggaggcgggtgtttttttattatttattttgcgtttagagaagttatatttaaaaggtcgtgtcgggtcgggttttcgtaggtagtgggattagagtcgggaggggcggcggtgtttcgggaaagcggtttttggggtattcgggttttttcgaggcgggtttcggacgtcgtcgtgggcggggtcgagggcggggtttggtttcgttgtggagcggttcgtaatttattatggcggtcgcggggtttggtgtttgtgtttgagtagcgttggagtcggagtcggttttcgggttttgcggttgaggagttttttcgttgtttacggtttttatcggcggggggcggttgggtttttcggcggagttcgggagatgtgattgtttgagggcggtggtggtgttagcgttcggggtcgggggagggggtgtttcgggtagagattttcgggtttggggtagttgaggcggtcgggttttttttatacggggttcgtttttcgttgtttgggtcgcgagagtttttcgttttttatagtttcgtttcggttttgggatattgcgggtggtttgttttttttagtttgggatatttcgttttttgaggcgtggaagagcgtcgtttcggagtaagttgttcgtgtcgcgtttcgatagttttttttagttttaagtcgttttttatttcggatttcggttttaattttggttacggagttttttatttaaattttttttttgttgttaaggggttttttttttttttaaggtggttttcgcgagtttttaatgttttgattttttttaatgttatttacggtttttttagttttagtttagttaaaaattttaatgtaaaggaaaagtttggattggttttataggttttttaaaaagcggatttaaaagttgttggtaatgtattttttttcgttagagtcgagggtaaattcgttgaaatttgggtgattcgtgttttttttcggagagtaaagtagagaagcgagagcggttattagttcggtaggaaatttgttggaagatgaagaagttaagatagggggttggtgatttttataggaaaagttttggaggagtagttaaagattattagcgttttttttatgtgtgagaattgaaatgattagtattattgattttttttagtattttttgtgaatatttttgtttaggtttttttttttgaaaagaaattgttatttagttcgtttaaaataaattaagaaatttttgggtaatattgtaattatatgaaattgataatcgcgaaaataattggaatttttgtttgtaagtgttaatttaaaaaaagtgtttttttttgttatggaagatgtttttttgtgattgattttaattgttgatttgtggagatgtagcgaatgtgaaattttacgtatatgttatttttttttacgttcgttgatcgttttggaagattttgaatttttttttggaaaggggtatttattattattttatggggtagtagtttggaaaagtatttggggattaaagaaggttaagtttgtttgttttgtattttattaaaggagtagggaagaaggaattatcgaggtatgggggtttatattgtaatgtttttgtggaatatggtgagtgttttttaaaatttttgtttatggttttttttatgtatttattttaggtttttaaggaattttgaataatagtatttgcgatagttttttttaattttatttaataaatttgttattgtagttattttttagtggaattttttttgtataagaaaaagttatttcgtgatttcggttttatttaaaatttatttgagttgtttattttttgtttgatttttttgttaatttattgttgattttggataagttattttattgttttagggttttagttttttgaggggttggattttagtggttttttagggtttttggttttatgattttgttttaatcgaagtcgtgggtttttttgataagtatggattttttattgttttgtttatagagagtttttattatatttttaaagtggtttgtgtttttgagaaagttaagaattatagatattggttgacgttaatatttttgattttttttttcgtaagtaggatttgaaaatatttattttggagttatgtgggaaaaattaagtggggaagtagtattttttgtgaattttagatagatagtttttgttttattttttataaggagtaatttttttttcgttgatgaagtttttattttgttttttttttgtttagaatgatatttgggttaataaaggttatttgtgatatttttatgaatatatttggtatttgaatgttgttcgtatatt

SEQ ID NO: 10 - DNA, 4001 bp, Artificial Sequence
  chemically treated genomic DNA (Homo sapiens)
aatgtacgggtagtatttaaatgttaaatatgtttataaaaatgttatagataatttttattggtttaaatattattttaaatagggagaagataggatgaaagttttattaacgaggaagagattattttttatggaaggtaagatagaagttgtttatttaaaatttataaggaatgttgtttttttatttgattttttttatatggttttaaagtgagtatttttaagttttatttacgaaggaaaaggttaaggatattagcgttaattagtatttatgatttttaatttttttaggaatataaattattttgagaatatgataaaagttttttgtagataaagtagtaaagaatttatgtttgttagaagagtttacgatttcggttagagtagaattatagaattagggattttaagaaattattgaagtttagttttttaggaaattaaagttttggaatagtaaagtggtttgtttaaggttaatagtgaattagtagaggaattaggtaagaaataagtaatttaaatagattttgaataaagtcgaagttacgaagtaatttttttttatataaagaaagttttattaagagataattatagtaataaatttattaagtggaattggaaggaattgtcgtaagtattgttgtttaaagttttttgaaggtttaagatgaatgtatgaggaaaattatgagtagaaattttgaaaagtatttattatgttttataaaaatattgtagtgtggatttttatgtttcgatgatttttttttttttgtttttttgataaaatgtagggtaggtaagtttggttttttttggtttttaagtatttttttaggttgttgttttataaagtaataataggtatttttttttagaagagggtttaagattttttagaacggttagcgagcgtagagggaaatggtatatacgtgggattttatattcgttgtatttttataagttagtaattgaagttaattatagaaagatattttttataataaaaggaagtattttttttaggttgatatttgtaagtaggagttttaattattttcgcggttattaattttatgtaattgtaatgttatttaaaagttttttgatttgttttaaacgggttgaataataatttttttttaagaagaaaaatttaaatagaaatatttataggggatgttgaaaagggttaataatgttagttattttaatttttatatataaaggaaacgttgatggtttttggttatttttttagaattttttttgtggaagttattaattttttattttagtttttttattttttaataaattttttgtcgaattagtggtcgttttcgtttttttgttttgtttttcggaaaaggatacgggttatttagattttagcgagtttgttttcgattttgacgaaaaggaatgtattgttagtaatttttaagttcgttttttaaaaggtttgtggaattaatttagattttttttttgtattaaagtttttggttgagttgagattaagggggtcgtaggtgatattggaagaagttagggtattagaggttcgcgggagttattttgggggaaggggagattttttgatagtaagggagggatttgaatgggaggtttcgtggttaaagttggggtcgggattcggaataaggggcggtttggggttgagggaagttgtcggggcgcggtacgggtagtttatttcggggcgacgtttttttacgttttagaaaacggggtgttttaagttgggggaaatagattattcgtagtgttttaaagtcggggcggggttgtaagggacgaaggattttcgcggtttagatagcggaaggcgggtttcgtgtagaggaggttcggtcgttttagttgttttaagttcgggggtttttgttcgagatattttttttttcggtttcggacgttgatattattatcgtttttaggtagttatatttttcgagtttcgtcgagggatttagtcgtttttcgtcggtaggggtcgtggatagcggaggggttttttagtcgtaggattcgggaatcggtttcggttttagcgttgtttaggtatagatattaaatttcgcggtcgttatgatggattacgagtcgttttataacgaggttaggtttcgttttcggtttcgtttacggcgacgttcggagttcgtttcgaggggattcggatgttttaagagtcgttttttcgggatatcgtcgtttttttcggttttggttttattgtttgcgaaagttcggttcggtacgattttttaaatgtggtttttttgagcgtaaggtgagtggtaaggaagtattcgttttttttgtattgttattggttttcgagaattcgggttaggtttttttttttcgttttattggtcggtgggagtagtagggttggattttttagttaatcgtgttcggcgtagttcgcggtgcgtgtcgggagttgtggttttatggtacgcgttcgagttcgtttgtattaagatttttggttcgggtttcgatttttggggttcggtttcgtttttttgggatttggtagatttttgtcggtttagcgtaggtcggatcgcgttttttcggcgcgagtagtgagatttggaagagttaaagcgagggaaaaattgcggattggatttttttggaagcggagtcggataattttttttagtttttaagggagaaaatttggttcgtttttagaaattaaggtttttgatgttttttaagttttttattttttaaaaagtataaatattagaattagcgggtcgggcgcggtggtttacgtcggtaattttagtattttgggaggtcgagacgggcggattatttgaggtcgggagttcgagattagtttgattaatatggagaaatttcgtttttattaaaaatataaaattagttaagcgtggtggtatatgtttgtaattttagttatttaggacgttgaggtaggagattcgtttgaattcgggaggtagaggttgcggtgaggcgagatggtattattgtattttagtttgggtaataagagcgaaatttcgttttaaaaagaaaaaaaaaaaaaaattagcgaagaaatatatagatatagggaaaatattcgatatgttgttaacgaatttaattgtttttttgggtattaggaggtttatttattatagaaaaggtatttgttgggtttgttaggcgttattagatgtttgttttagaacgaatttttaatattataaatattttataggtggatacgtgtttatatgaaaatattttttatattagtcgagaaaatgtttagatggttgggtttagtaagtcggtagaattaatgatttagatgtgttaaagttatatttaataaataatttatgttttgcgattaaaaagtattttggtttttattataggttttttacgtttttttagagcgttgtatttgataggtattttatttttttttttttttttttttttttttttttttttttttttttttttttttttttttttttttttttttttttttttttttttttttttttttttttttttttttttttttttttttttttttttttttttttttagatggagttttgtttttgtcgtttaggttgcgatgtagtaataggattttagtttattgtaatttttatttttcggatttaagcgatttttttgttttagtttttcgagtagttgggattataggtatatattattatacgtgtttaatttttgtatttttagtagagatagggttttattatgttggttaggttggtttcgaatttttgattttaagcgatttatttattttggttttttaaagtggtgggattataggcgtgagttattgtttttggttcgagattttatttttaaggagggatttatttattatagtttttattttatatcgagtattgtttatattttttata

SEQ ID NO: 11 - DNA, 5525 bp, Artificial Sequence
  chemically treated genomic DNA (Homo sapiens)
atttttttttatggtaattgggattagattgttttatttttcgatatttttgtaagatttttttatgaatattttgatatttttttgagtttggagaaaggcgttttttttgtgtatttagtttgataaattttttagttatagtttttattttggtatgtaaagttttgtatttattatattttgtattgacgttatttttataatttcggcgttgtttataggagatgatagtaatatattttattaaataatttgggagtttaattgttgaaggttttatggaggtagtgtaattttttttagtttttttattggaatttggattggagttatttagtttggtaattttttttttttttttaagatttttttttttttttttaatagttttaatgtcgtgtttttttatttggtttttttttttatgttttttagatttttttttggattttttgtgagatattgaatggtttttttttataggttttggatattttaatagaattgaattagggggtaaggtttttagagaagttttagaggtatatttgttttgttggtttttatagatattattgttttgattaaaattgttaataggtaggttttgagttttcggttttttggagtgttaggggaattggagttagaatttataatttgaggaggatgtgaaatcggtagatgggttgaaggtaagcggtggaggggtggggatggtagtagttgtagggggtagagggaggtttgtagtagattttttattggtgggatttaaatgattatttagtgttggtggtattttgttcgttaggtgagatattcgggtttttttatttattaaatgattaataaattttgaatttaaaagtcgtgtttgaggagaagatatagcgtttttattagaatatattggagattttgaacggttggtgtttgtagtattttgagatggatttagttttttagagagtattgattttaatgattaagtgtttattttattgtatttaggttagtttttttgaagttttttaaaaatataattttttgaagtatacgagaggtttttaggatttagattggttatttgttgtagaattgtttttagggagtttttgtttttttgattgatattatttttttggagtttagtaagtagtttcggttttttgtaggtttttagggttagtaagtgaattattttgtttttgtatggtttttgagagacgttgttgttgttgtgtgtttatcgaattggatttgtagggtttatgggggttgattttttttttttaggaattgtatttgaaatagtttgaggtgtttttcgaatttgtatttttttttttatatatggtttatcgggtttgataatttttgtgtttcggttgcgggattttttttttgtttgggtcgttttttttcgtgttatttgattcgagtcgtttgttgtatatattgtaattttattttgtataaattttaggtaattgagttgggaggttttagagttggagaatgtttgttggacgtagttaaagttgttttgagggttgtttttgtttatatttgataaataaaagttaaagttatgaattttattgaggggattatttttgggaattttgataagtttttggagtttttggaattgaattgaaggtcgaaaagaaattaaatttttgtggttttggtaagtttggagcgtttggatcgtcgattcggtgagttttatatgtagtacggtgatgttgttttgttttagtcgttcgtattagagtttatagcgttgtttcgcgatttttttattttcgatattttaaatttttagaggtgtcgtcgtcgttagtttagttttagtttttattgcggtcgtagttatttgggtttttgtagtcgtcgttattgttagggttatttcgttgttggcgtattgttatatattgcgcggagttagatttcggattgttatcgtcgttatttgttttattttttggtttcgcgtttcgttttaggttagttttattggtttagtttttttagaatcgtttttatcggtcgttttttatttttacgggggcggggtttaaagtcgttggagttttgtttttgggattggacgttcgagaggtaagagagttattataaggttttttaatttttatgttttttttagtggatttttaggttattgtggtttgtattattaggttatttataaaaatgaatatttttttaaattaggttattttatagtaaattacggtttttgattattattatgttttgaataaagattatgagtaattgtatttgaatgttgttgaattttattgattgaattttgaattgtttgattttgattaggttggtttgtggaaagtgttattaagaagagttttttagttcgttggtattatttttttgatagttattataaaagtttttttgatgtatttttttaagaattttaaatttttatatgtagttattttttgtatattaaatggtttttttatggttaggataataaaaatatgaagaaagtatataagattttaattaatttgacgttgtgaattgtgaattttgaattgaaattaagtaagttttttatgattaggttttaaggttttggttagttttttaaaattgagaggttgaaattttttgattaaaattaatatatttgttttttttttttagtttttggaaattattattttaattttgtttttataaaatagtaaattattttagagtttatatataagtgagattatgtagtatttatcgtgggtttattttaaggttttgagtaaattattatttttttgtgttagggtattttgagttagttttgttataaattattttgtttaggtaatatattgtaaaacgttttataatttaatggttttttttttagaaaaaaagtagtgaaagttttaatagttaaaaagtgtttaatttaattgatttttgggaaaaaatattcgtataattttagatagttttaatttttgaaggtaatatagtttggtttttgttgataaataaataaaaataaaaaaattatatatatatatatataaattagttttttgtttttaagtgtgtaagaatgttagtatttaaaatttttaagatatataaaaattaaatagaattgtttaagtttttaaagggagtttggaaatttgaagaaagtaaagttaaaaatattgttttatgagttatataattatttttttttttattttttatagttttttttttatttattatttaggtaattttgtatttaaatttaataatttaatattttatttgttataagaatacgttattatgttattttaagtttttttgggtaaattatatataattagataggttgggttagggttgtttataagattttagtttagagtgtggtgtagtagtttattttttttaggatttttgttgtaataggatatgggagaagggaaatattaacgttagtagaatgggaggaattagattatggagatatgatttttgttttttggtatttttttagttgatttagaagaggatatagagggagatagatatatggttatttttataattataaattttgttatatgttgagaggatggttttttaaagttagttagtgtataagtagtggaggttgggattgttttattttttttgtttagggttatatagtttggtagatttggaaagatttttttgagaaagtgattttggaattgatattttagtggaaataattaggtattgggagggggtgaggtgaggagaaggttaagaatttttatgtagagggaattttgtgtagagattttagttaggaagaggttttgtatagtggaggaattgaaagttaatagttaggttatagtatagagtaaatgatgttggggtgtgaggtgatgttaaaaggtagatattagggttagagggcgtataattttgtaggtcgtgttaatgattttgttttttatttaagaatgttattttaggagattagttaaaaggttagggtgatggtgacggtggaaatatagaaaaaggaatttatttaagaggtatttaaaaagaagtgaaatagagatgagttggagatagattggataaaaagagtgagggagagggaggtgttaggttgtagtttaggttttgagttgttaaagaggagtttttttttttaggtgagttaaggtttagaattacgatttttggttatttttttttatttttagtgtgagaagtggcgagttggttgtttaggtatatattgttattttatatttattgtttaagatagaggcgtatatttggaaagtgaatgagttaggagttagaggagaaggtatgtcggtagaggttagggcggagaggaggaagagagtttgggggcgcgtttttaaaaaggagttagggaagatagagtagaggtcggggaggggagagtaaggattatgataggaggaaagagaggttagggaatattgaggtggaggaattttgggatatgatagttgtaaagaattgtagttaatttaatttagtttttttaatgtgtaattgaggaaattaatttttatgcgtttattttattgtaaatgtggtatttgtatttgagaaattttggaaaatataaagatgtaaagtaaattaagattatttatagtttttttatttagagatatgtattgttaaagtaaggattttgatttttttttttttttgtatttttattatggttggaattgtaatatagacgtaattttatgttttgtttttaaaatataaataatggttgtaaagcgttttatacgttgatttaaagttttttttgaaataggaaattgagatacgtcggttgtgaaatttattgaagtgagcggcggcgttaggatttttgggatttcgatttttttgtagttcgtatagttaagggcgagggcgtttttcggtagaagtagtaaatcgtcggtaagtttagcgaggagggttgtcggggtttgggtttgggaattggttggtatttagcggaaagggacgtgagttgagcggcgggggagaagagtgcgtaggttagaaggcggcgcgtagcggcgtttcgcgaggtttttacgtcgggcgatatggggtgtttgttgtttttgttgttttgggcgtttttttaggtttggggaagcgttgaaggtgggtggaacgagggcgtttgagtgtattcgcgggagggcggagagagggagttgggtagggacggggagggtaacgtttgatggggattggtgagattcgggacgtattggcgcgatttaggtagaaaattcgttgttttttggtttcggggagaggtagcgcggtatagagttcgttggtattagtcgttttttgaagtttatttttttttgttttttttttttttttttttatgttggttgttttttcggttatttgttacgcgtttttaatttttatttttttttagt

SEQ ID NO: 12 - DNA, 5525 bp, Artificial Sequence
  chemically treated genomic DNA (Homo sapiens)
attgggagagaatgaagattggaggcgcgtagtaagtggtcgggagagtagttagtataaagagaaggaagaaagaaataagaggagatgagttttaggaggcggttgatgttagcgaattttgtgtcgcgttgttttttttcggagttagggagtagcgagttttttatttagatcgcgttagtgcgtttcgggttttattagtttttattaggcgttgtttttttcgtttttatttagtttttttttttcgttttttcgcgagtgtatttaagcgttttcgttttatttatttttagcgtttttttaagtttggaggagcgtttagagtagtagaaatagtaggtattttatatcgttcggcgtggggatttcgcggagcgtcgttgcgcgtcgttttttgatttgcgtatttttttttttcgtcgtttagtttacgttttttttcgttgggtgttagttaatttttaagtttagatttcggtagtttttttcgttgggtttgtcggcggtttgttgtttttgtcgaagggcgttttcgtttttagttgtgcgagttgtaaagaggtcggggttttaggaattttggcgtcgtcgtttattttagtaggttttataatcggcgtgttttaattttttgttttaaaggagattttgggttaacgtgtgggacgttttataattattatttatgttttggaagtaggatataaggttgcgtttgtgttataattttaattatggtaaaaatgtaaagggaaaaaaggattaaagtttttgttttagtagtatatgtttttaggtggaaagattatgagtgattttaatttgttttatatttttatgttttttaaaattttttaagtgtaagtattatatttataataaagtaaacgtatgaaaattaatttttttagttgtatattgagagaattggattaggttggttataattttttataattgttatattttaggatttttttattttagtgttttttagtttttttttttttttgttatggtttttgttttttttttttcggtttttgttttgttttttttgatttttttttggggacgcgtttttagattttttttttttttttcgttttagtttttgtcggtatatttttttttttggtttttgatttatttattttttaaatatgcgtttttgttttaaataataagtgtaagatgatagtgtgtatttggatagttaattcgttattttttatattgaaaataagaaaaagtgattaaaaatcgtggttttaagttttagtttatttggaggaaaagatttttttttggtaatttagaatttgggttgtagtttgatattttttttttttttattttttttatttaatttatttttaatttatttttattttatttttttttgaatattttttgaataaatttttttttttatatttttatcgttattattattttaattttttgattgattttttgaagtagtatttttgggtagaaaataaaattattagtacggtttgtaagattatgcgttttttagttttggtgtttattttttgatattattttatattttagtattatttgttttgtattgtagtttggttgttagtttttagtttttttattatgtaaaatttttttttgattaaggtttttgtataaagttttttttatatgaaagtttttgattttttttttattttatttttttttaatgtttagttatttttattaaggtattagttttaaggttatttttttagggaagtttttttagatttgttagattgtgtgattttaggtaggagaagtagggtagttttaatttttattgtttgtatattaattggttttgagaagttatttttttagtatgtagtagagtttataattatagaaatggttatatgtttgtttttttttgtgtttttttttaaattagttggagaggtgttagaaggtaaggattatgtttttataatttgattttttttattttgttaacgttaatgtttttttttttttatattttgttgtagtaagagttttagagaaaataggttattgtattatattttaggttgggattttgtagatagttttaatttagtttatttaattatgtgtaatttgtttaaaaaagtttaaaataatatagtaacgtgtttttgtaataaataaggtgttaaattattaaatttggatataaaattgtttaaataatggataggagggaaattatgagaaataaaaagaaaaataattatatgatttatggggtaatatttttaattttattttttttaaatttttaagttttttttaaaaatttgaatagttttgtttagtttttgtgtattttaaaaattttaagtgttaatatttttgtatatttaaagataagaagttggtttgtgtgtgtgtgtgtgtggtttttttgtttttgtttgtttattaatagaggttaggttatattatttttagaagttaggattatttggaattatacggatatttttttttaaaggttagttgagttagatattttttggttattggaatttttattgttttttttttgggaaaggaattattgaattatgaaacgttttgtaatatgttatttaaataaaatagtttataataagattgatttagaatattttagtatagagagatggtgatttatttagagttttaaaataagtttacggtgggtattatatgattttatttatatgtggattttaaaatagtttattattttatggaaatagagttagggtagtggtttttaggagttggagggaaggggtaaatgtgttaattttggttaaagggttttagttttttaattttgagaggttgattaaaattttggagtttgattataagggatttatttggttttagtttagaatttataatttataacgttaaattagttggaattttatatgttttttttatgtttttgttattttaattataaggagattatttaatgtataaaggatagttgtatatgagaatttaagatttttgagaggatatattagggaaatttttataatagttattaggaggataatattaacgaattaaagaattttttttaatagtattttttataagttaatttgattaaaattaaataatttaaagtttagttaataaagtttaatagtatttaagtgtaattgtttatagtttttatttagagtataatggtgattaaggatcgtagtttgttgtaaaatggtttgatttaaagaggtatttatttttgtaagtagtttgataatataaattatagtaatttggagatttattaaaagaaatataaggattagaaaattttgtgatagtttttttatttttcggacgtttagttttaggagtaaaattttagcgattttgggtttcgttttcgtgaaagtggaaggcggtcgatgaggacggttttgagggaattagattaatgagattagtttggggcggggcgcggggttagagggtggggtaggtggcggcgatggtagttcgaggtttggtttcgcgtagtatatgatagtacgttagtagcgggatggttttagtagtggcggcggttgtagaagtttaagtagttgcggtcgtagtggaggttggagttggattggcggcggcggtatttttgggagtttaagatgtcgggggtgggggggtcgcggggtagcgttatgggttttagtgcggacggttggggtaggataatattatcgtattgtatgtgaagtttatcgagtcggcgatttaggcgttttagatttattagagttataagaatttaattttttttcgatttttaatttagttttaaagattttaggagtttgttaaaatttttaaaaatgatttttttaatgaagtttataattttaatttttatttgttaaatgtgggtaaagataatttttagggtagttttgattgcgtttagtaaatattttttagttttggagttttttagtttaattgtttgggatttatataagataaaattatagtgtgtgtaataaacgattcggattagatgatacgagaaagaacgatttaggtagaggaggaatttcgtaatcgaagtatagaagttattaaattcggtggattatatgtagggaaaagagtgtaaattcggaaagtattttaagttgttttagatatagtttttgagaggaaaaggttaatttttatgaattttgtaaatttaattcgatagatatatagtagtagtagcgttttttagaagttatatagggatagggtggtttatttattggttttgaaggtttataagaaatcggagttatttgttagattttagaaagatggtgttaattaaaaagataggaattttttgggagtaattttgtaataggtagttaatttgaattttaaggatttttcgtatattttaaaggattatgtttttaaagagttttagagagattggtttggatatagtgaaatagatatttggttattggagttaatgttttttagaaaattaaatttattttagaatgttgtaggtattagtcgtttagaatttttagtatgttttagtagaaacgttgtattttttttttagatacggtttttggatttagagtttattgattatttaatggataaaaaagttcgaatattttatttgacgagtagagtattattaatattaaatggttatttgaattttattagtgaaaaatttgttgtaggtttttttttgttttttgtagttgttgttatttttatttttttatcgtttgtttttaatttatttgtcggttttatattttttttagattgtaaattttaattttaatttttttagtattttagaaggtcgggggtttaagatttatttgttgatagttttagttaaaataatagtatttatgagaattaataagataagtatatttttaggatttttttggaaattttattttttggtttagttttattaaagtgtttaaagtttatggaagaaaattatttagtgttttataaaaagtttaaaaagaagtttaaaaaatataaggaaaaggattaaataaaaaagtacgatattgagattattgaggaaaaggagaaagattttaagagagaagaggaaattgttaagttaaataattttagtttaaattttagtggaggagttaaagaggattgtattgtttttatggaatttttagtaattgaatttttagattatttgataaaatatattgttattattttttatgagtaacgtcggaattataaagatgacgttagtgtagagtatgatgagtatagagttttgtatgttaggatggagattgtagttagaagatttattaaattagatgtataaagaaagcgtttttttttaggtttaaaagagtattagaatgtttatgaagaagttttataagaatatcggaagataaagtagtttagttttaattattatgaagaaaaat

SEQ ID NO: 13 - DNA, 5659 bp, Artificial Sequence
  chemically treated genomic DNA (Homo sapiens)
taatgattatttttagtgtttagttttttttttaagtaaaatatataattaatgttaggtaagttttttttaatggttttttagagagttaaacgtttttatgttgagttggaaatattgatgtttttttttttttgagatagagttttattttgttgtttaggttggagtatagtagtacgatttcggtttattataatttttgtttttcgggtttaagtgatttttttattttagttttttaagtagttgggattataggtatgtattattatgtttagttaatttttgtagttttagtagagatagggttttattatgttggttgggttggttttaatttttgattttaggtgatttgtttattttagttttttaaagtgttgggattataggtacggtggtgttcgattgatttttttttttttttttttttttttttttttttgagacggagtttcgttttgtcgtttaggttggagtgtagtggtgtaattttagtttattgtaagtttttttttttaggtttatgttatttttttgttttagttttttgagtagttgagattataggtattcgttattatatttagttaatttttttgtatttttagtagagacggggttttatcgtgttagttaggatggttttaattttttgatttcgtgattcgtatattttcgttttttaaagtgttgggattataggcgtgagttattacgtttggttcgattttttttttaaatgttggtttttttggttttaatattttgttattattttgataattaagaaatatgtttttgttttaaataataaagattaagagattatttgttttaggtaaatagaaaaatttttattattttttttaatgtgtttagtaaaattataaaggtaattatgttttggggaattaattattttatatagtatgaagtaaataaagttattttgtttaataaattaaataatattagttagttgaggggtataaagaatgaattaattttttttttttgttttattaattttttaagttttatttttaagtatttttgatttaaagataagattgtttttttttgattatttaatttttattatgtttattattaaagttaaagtagatgtaataagttttaatattattgaatttaatattttaattaatagaaatatagattatatttaggttgggtgtagtggtttacgtttgtaattttagtattttgggaggtagaagtgggtggattttttaggtttaggagtttgagattagtttgggtaatatagtaaaatttcgtttttattaaaaattgaaaaaaattagttgggtatggtggtacgtgtttgtagttttagttacgagaaaggttgaggtgggaggattatttgagtttagggaggttaagtttgtagtgagtcgtgatcgtattattgtattttagtttgggtaatagaatgattttgttttaaaggaaaaaaaagaaagaaagaaaagaaatgtagattacgttttagtagtttgggtgaaagttatgaaaataatttacgggaaaaaataattagtttgtgaaataatttttgtaatataattaagagttagtgagaggaggtgatagttaattaagtatgtgaaatgaaatgttttgtagttagttatatttttaggagggttatttttagtttatgtagtttttataagttgttttaatgttataaaaatattatttttatcgagtttatattatttttttggagattgaagagatatttaaattaaatttttgagtttttttttttagtttatttaagttaatttataaaaatataggggaaagaatatagttttaaaaaattaaaacggaaaataaaaaatgtagaaattatagtatgaagttaagagtttaaataagtttataatattaaagatattttatgagtaaaataagaaaattaagtagtaattatttagtttattgattatggttttttttggaatgtagtgaaagatttagttttgttttttgtatttattataggtgttaagagtttaaggagggtttaagattaagggaagttaaatattgttagggaaagtaaatatatgtttaaattattatttttaaataagtttattatttataatttaaaattattaatttttatgtggtttttgtaagtattttttaattttatttttaaataaagagaaattattacggaagtattttttttagaagataatttataattattatttaattcgatttttttttttttttttttttggaaattttggtatatggatttgttattattgttaagaattatttagggttaggcgcggtggtttacgtttgtaattttagaagtttgggaggtcgaggtaggtggattatttgaggttaggagtttaagattagtttggttaatatggtgaaatttcgtttttattaaaaatataaaaattagtcgggtatggtggcgggtatttgtaattttagttatttgggaggttgaggtaggagaattatttgaatacgggaggcggaggttgtagtgagttaagatggtattattgtattttattcgtggtgatagagcgagatttcgttttaaaaaaaaaaaaaaaaaaaagagagacggagttttagttttgttgtttaggatggtatgtagtaatacgatttttgtttacggtaatttttgttttttgggtttaagtgatttttttgttttagttttttgagtagttgggattataggtatatattattgtgtttagttattttttgtatttttagtagagacggggttttatcgtgttggttaggttggtttcgaatttttgattttaggtgatttatttgtttaggttttttaaaatgttgggattataggtgtggtgagttattgcgtttagtttttttttttattttggggaatattttattttgtttatggagtagttgttgttttattattttatttttttaataaatttgtttatattttgtattgcgattcgttttgaattttttttgtatgagatttaagaatttttttttgtggtttggattgggattttttttttgtaataaatgtattggttgataggagaataaagaaaaaaaaagaggaaaaattagagtaatttttttatataattatattatatgatcgttttgttaattatgataatagttaataaaataatttttttatgtttaatttttagtttatgtttgtatgttttaaaatgttttttatagttggtttgtttaattatttaatgaaggattaaatattgtagttggttgttatgtatttagttttttaattttgatttttagattatttttagtttattttattatattcgttttaagttttttgagttagttaattttaatttgttatgtattttataaaatgttttttttttttttatagtcgattgtttttttgtttttggagtttttttttttattttttaaggttattttgagtatatttttttgtttcgtgaaatttatttttttttttttttttttttttttgagtttaattagttgttatcgtaggtttttgtttttttttatagtgtggttagaattcggttttgtttgttagtagagggtagggtcgttgtttttttttttttgtagtttttaagtttagtatatgtttggtatttagtggtagtataataaggaatttgatgaatattttttttttttgtttttcgttttttttttatagtttgttagttatggttaggaagagtaagattcggaatgggtttggtgtgtttcgcgggaaggtcgtgattttggaagatgttttttagtttagttcggattttttttttttagttttagagattttttttattttttgtgtatatatatatattaagatttaggaagtggtttttgaggtaggattttaagagtttaaggagtggggtcgaggttggaggtgtgggggtgtgacggtcggttttatttttcggtttgtttagattagttttttttggggattatttttggtatataagggagggaggtagtttgatttttttagttcgtttttagtttttatttggttttgttttttgggataagacggggaaatttagaggatgtaagttttttttgttttcgtgtttttttttaagttttcgttattatagacggatgtaggagttgtttgggaggttggaagtatagattttgttaatttttttttagagggcgggattcgacgcggacgtgttttgattgattgggtagcgtggtttcggggaagggtttttttttttttttttagattaggatttttggaaaatggagaagttgtgttaatagaggggggttagaaatttttattttagaatgttgtagaatgttgggagatatttaggatgtgagttagggattttttggaagtgtttgttttggttttattcgattttaggtagtttttagttgtttgtatagtcggatggggagggggtttgtatagagttggagttagaggagagagttggtttattttttacggtaggatggggaaattttatagattatattgttattcggttttagtttttcgtttcggcgtttagagggtaatttttatttatttcgttcgtttttttgaattagagtgatttaggttgcgtttcgtttcgtttttttatttcgagttggtacggaggtatagcgttagaggggggttttaggcgtttcgaggttttgtttttgcggttttttttttgcgggggtgggcgttttttttcgggtaggggttacgtggttttggtcgggcggggggttcggtttatttcgcgtcgggtttagtgatttaggtcgtagttgttatcgcgttatatgagggaggtcggcggttattcggcgggggaggggatcgtggttggagttcggggcggggtcgcgcggtaggcggggcgggagtcggggggcgtagttagagagtttcggagtcgcggcgggagaggaacgcgtagttagttttgggaagtttaggtgaggtcgcggggattcggcggatttcggcgcgggttgggagagattattcgtagtttttttttttagggttcgttttaggttcgcggagattcgttcggcgttttttagtcgttttggagtaattttgtttcgaagttttttgggttcgggtagggtgtggcgggggtgttggttgtattttttttttttttggtgggcggggaggttagagtttaggggaaaggggttggggcgggggtcggggttgggttgaagatcgtttttttaggttgggtgttgggtggggaaagggtgtttgacgttcggagattggcgggtcgagggtcggcgttaggtttaagtttttgtcggcgtttttggatttgttttgggttttagaggcggcggggcggggttcgggtttcgcggtcgtcgtttttattttttttttgcgggtaaagagggggttgggagacgtggattcgatcgcgggttttcgggtgggaggggtcgggaatcggggtcgtgaagggaagttttcgagggtcggtcgggagttcggaaatcgaggttttttttcggttagttttaattttttcgtttttttttttgttttagg

SEQ ID NO: 14 - DNA, 5659 bp, Artificial Sequence
  chemically treated genomic DNA (Homo sapiens)
tttggggtagaggggagggcggggggattaaaattggtcgaagggggatttcggttttcgggttttcggtcggttttcgagggtttttttttacggtttcgattttcggttttttttattcggaaattcgcggtcggatttacgttttttagttttttttttattcgtaggagaggggtgggggcgacggtcgcgaagttcggatttcgtttcgtcgtttttggggtttaggatagatttaagggcgtcggtaggggtttgagtttgacgtcgattttcggttcgttagttttcgggcgttaaatattttttttttatttaatatttagtttggagaaacggtttttagtttaatttcgattttcgttttagttttttttttttgggttttgattttttcgtttattaaaaaaaaaaaaagtgtagttagtattttcgttatattttgttcgggtttagggaatttcgaagtaaagttgttttagggcggttggagagcgtcggacgagttttcgcgggtttggggcgagttttggaggaagggattgcgggtggttttttttagttcgcgtcgaagttcgtcgggttttcgcggttttatttgggttttttaaggttggttgcgcgtttttttttcgtcgcggtttcggggttttttagttgcgtttttcggttttcgtttcgtttgtcgcgcggtttcgtttcgggttttagttacggttttttttttcgtcgagtggtcgtcggttttttttatgtgacgcggtaatagttgcggtttgagttattgggttcggcgcggggtgggtcgagtttttcgttcggttagggttacgtggtttttattcggaagaaggcgtttattttcgtaaagggaaagtcgtaagggtaagatttcggggcgtttggggtttttttttggcgttatattttcgtgttaattcggggtaggagagcggggcggagcgtagtttgggttattttggtttagagaagcggacgaggtgggtgagagttattttttgagcgtcggggcggagagttgaggtcgggtgataatgtggtttgtgaggtttttttattttatcgtaggggatgagttagtttttttttttggttttaattttgtgtaagttttttttttattcgattgtgtagatagttggggattgtttggggtcgggtggggttagaataaatatttttagaaagtttttggtttatattttgggtgttttttaatattttatagtattttagagtggggatttttggtttttttttattagtatagtttttttattttttagggattttagtttgagaaaaggggaggaagttttttttcgaagttacgttatttagttaattaagatacgttcgcgtcgggtttcgttttttgggggaggattgataaggtttgtgtttttagttttttagatagtttttgtattcgtttgtgatagcgagggtttgggggaagatacgaaggtaggagaggtttatattttttggattttttcgttttattttagaagataaagttaggtgagggttggaagcgggttagggggattaagttgttttttttttttgtgtgttaggggtggtttttagaaggagttgatttgaataggtcggagagtaggatcggtcgttatatttttatatttttagtttcggttttattttttgggtttttaaggttttgttttaagaattattttttgagttttagtgtatgtgtgtatataaagaatgaaagaagtttttagagttaaaggaaggagattcgggttgggttgagaagtattttttaggattacggttttttcgcgggatatattaagtttatttcggattttgttttttttgattatggttggtaggttgtggaggaggagcggagagtagaagaaaggagtatttattaggttttttattgtgttgttattagatgttaggtatgtgttaggtttgggggttgtaaggagaggaagatagcggttttgttttttgttagtaggtagaatcgagttttggttatattgtgaagaaaggtagaagtttgcggtggtagttggttaagtttagagggagggaaagggagaggagaatggattttacggagtagaaggatgtgtttaaggtgattttggagaataaaggggagagttttagggatagagaagtagtcgattgtggaaaaaaaaggagtattttgtaaagtatatggtaggttggggttggttggtttaaagggtttgggacggatgtggtgagatgggttgaaggtggtttgaagattaagattgagagattagatatataataattaattgtaatgtttggttttttattgaatggttgaataaattagttgtgaaagatattttgggatatatagatatggattgagaattagatataagaaaattattttgttaattgttattatggttaataaaacggttatataatatgattatgtagagaagttattttagttttttttttttttttttttttatttttttattagttaatgtatttgttataggaaaggggttttaatttagattataagagagggtttttggattttatgtaagaaagatttagggcgagtcgtagtgtaaagtataagtaagtttattaagaaagtaaagtggtgaaataatagttgttttatagatagagtaggatgttttttaaagtaagaggaggggttaggcgtagtggtttattatatttgtaattttagtattttgggaggtttaggtaggtggattatttgaggttaggagttcgagattagtttggttaatacggtgaaatttcgtttttattaaaaatataaaaagtagttgggtataatgatgtgtgtttgtagttttagttatttaggaggttgaggtaggagaattatttgaatttaggaggtagaggttgtcgtgagtagaaatcgtgttgttgtatgttattttgggtaataagattgaaatttcgttttttttttttttttttttttttttgagacggagtttcgttttgttattacgggtggagtgtagtggtgttattttggtttattgtaattttcgtttttcgtgtttaagtgatttttttgttttagttttttaagtagttgggattataggtgttcgttattatgttcggttaatttttgtatttttagtagagacggggttttattatgttggttaggttggttttgaatttttgattttaggtgatttatttgtttcggttttttaaatttttaggattataggcgtgagttatcgcgtttggttttaaataatttttaataatagtagtaagtttatgtattaaggtttttaagaaagaggagggaagagaatcgagttgggtagtagttataggttgttttttgaaaaaggtgttttcgtgatagtttttttttgtttggagatagagttaagaaatatttgtagagattatatgagaattaatgattttggattgtgaatggtagatttgtttggaggtgatgatttagatatgtgtttgttttttttggtagtgtttggttttttttgattttaagttttttttaggtttttgatatttgtgataaatgtaggaggtagggttgaattttttattgtattttagaggaggttataattagtggattggatggttgttgtttagtttttttattttgtttatagggtgtttttgatgttataggtttatttgaatttttagttttatattatagtttttgtattttttgtttttcgttttgattttttaaaattatgtttttttttttatgtttttataggttaatttggataagttgaaggaaagagtttaaagatttggtttgaatgtttttttaatttttagaaaggtaatgtaggttcgatggaagtaatgtttttgtgatattagagtagtttatgggaattatataggttggaaatgatttttttgagaatgtagttggttataaagtattttattttatatatttgattgattgttatttttttttattgatttttgattatgttataggaattattttataagttgattgttttttttcgtggattgtttttatagtttttatttaggttgttagagcgtggtttatattttttttttttttttttttttttttttttgagataaggttattttgttgtttaggttggagtgtagtggtgcgattacggtttattgtaggtttgatttttttgggtttaggtgatttttttattttagtttttttcgtagttaaaattataggtacgtgttattatgtttagttaattttttttaatttttggtagagacgggattttgttatgttatttaagttggttttaaatttttgggtttaagggatttatttatttttgttttttagagtgttgggattataggcgtgagttattgtatttagtttgagtatggtttatatttttgttggttaagatgttaaatttagtgatgttaaaatttattatatttattttaattttgataataggtataatgggaattaaataattaggagaagatagttttgtttttaggttagaagtatttagaaataaaatttggaggattggtggaataaaaaaaaaaagttaatttattttttatgttttttagttaattgatattatttagtttattaagtaagatgattttgtttattttatgttatgtggggtgattggttttttagggtatagttgtttttgtagttttgttaggtatattggagaaaatgataaggatttttttatttgtttagagtaggtggttttttaatttttgttgtttagaataagaatatgttttttggttgttaaagtggtggtagggtattaaaattagaaaaattagtatttaagaaaaaaatcgggttaggcgtggtggtttacgtttgtaattttagtattttgggaggcggagatgtgcggattacgaggttaggagattgagattattttggttaatacggtgaaatttcgtttttattaaaaatataaaaaaattagttgggtgtggtggcgggtgtttgtagttttagttatttaggaggttgaggtaggagaatggtatgaatttgggagggggagtttgtagtgagttgagattgtattattgtattttagtttgggcgatagagcgagatttcgttttaagaaaaaaaaaaaaaagaaagaaagaaaaaaattagtcgagtattatcgtgtttgtaattttagtattttgggaggttgaggtgggtagattatttgaggttaggagttgagattagtttagttaatatggtgaaattttgtttttattaaaattataaaaattagttgggtatggtggtatatgtttgtaattttagttatttggggggttgaggtgggagaattatttgaattcggaaggtagaggttgtagtgagtcgagatcgtgttattatattttagtttgggtaatagagtgagattttgttttaaaaaaagaaaaatattagtatttttaatttagtatgaaagcgtttagttttttagaaagttattggaagaaatttatttgatattggttatatattttgtttgggaaaaaaattaaatattaaaagtaattatta

SEQ ID NO: 15 - DNA, 6621 bp, Artificial Sequence
  chemically treated genomic DNA (Homo sapiens)
tttgtatttttagtagagatggggttttttttttttttttttttttttttttgagagggagtttcgtattgttatttaggttggagtgtagtagtgttatttttatttattttaattatcgttttttaggtttaagtaatttttttgttttagttttttaagtagttgggattataggtgtttattattacgtattattaattttttgtatttttagtagagatggggttttattatgttagttaggttggttttgaatttttgattttatgatttatttatttcggttttttaaagtgttgggattataggcgtgagttattatgttcggttaagatggtgttttatcgtgttggttaggttggttttgaatttttgatttcggttttttaaagtgtcgggattataggtgtgagttattgtgttcggttaggagttttattgtgaagggaaggaatgaatatagttggaggggaaagtggtattaaggaaaggttttttattattaataataaatattttattgaaatatattatttatatagaatagttaataaattttgagtgtgtagtttaatgaatttttataaggtgaatatatttaggtaattagtatttagattaagaaatggaaagtggttaggtgtagtggtttatgtatataatgttaatattttgggagtttaagacgggaggatcgtttgagttcgagagtttgagattagtttgggtattatagttagattttcgtttttaaaattatatatatatttttttttgagatagagttttgttttgttgtttaggttggagtgtaatggtatgattttagtttattgtaattttcgttttttgggtttaagtgattttattgttttagttttttaagtagttgggattataggcgtgtgttattatattcggttaattttttgtatttttagtagagacggagttttgttatgttggttatattggtttcgaatttttgattttatgatttatttatttcggttttttaaggtgttgggattataggcgtgagttattatgtttagttaaaataaaaaataaaatttttaattagttaggtttatgggtgtatgtttgtagtttaggttatttaggaagttgaggtgggaggattatttgaatttagaagttcgaggttatagtgagttatgattatgttattgtattttaatttgggttatagagtaagattttgttttaaaaagtgaaaaataaataagaaatagaatatgattagttgttaatattttttttatggttttttgtagttattattatttttttgaaaggtaattagtattataattaattttttttttttttgagacggagtttcgttttgttatttaggttggagtgtagtggtttaatttcggtttattgtaatttttattttttgggtttaagtaatttttatgttttagtttttatagtagttgggattatagttgtgtattattatatatggttaatttttgtgtatgtatatatgtgtgtatatatatgtttgtgtatattatatgtgtgtatatatgtatattatatatgtgtgtatatatgtatatatatatatatatgtatatgtatatatatatatatatgtatatgtatatatatatatatatgtatatgtatgtatatatatatatgtatattatgtatatatatatatgtatgtatattatgtatatatatatatatatatgtgtgtgtgtgtatatatatatatatttttttttagtagagatgaggttttattatgttggttaggttggtttcgaatttttggttttaagtgattcgtttgttttagttttttaaagtgttgggattataggtgtgagttagatttaaatagtatgttttttttgtgtttttttttttatgtttgatagttgatgtgagatttatttttattgtgggtagcgtttttgttttttttattattgtataaaataattttgttttatttatttattttattgttgatgggtattagggttgttttttgtttggagttaaaatgattaatatggttatgaatatttgtgtatatgtattttggtatatttgaattgtattgtagtttttgtgttaatttttttttttttatggttttttgtggttattttttcgtttttttatatgatttttatagttgtttgtgattttattttggttatttttagtgatttttttgggtgtatttttgaattatggattcggttatttttttgtggtttttattttagttttagttttgcggttttgttttattatattaagtttttaatgttggtgttttttagatttagggttttaaaaattttttgtatatttttaatgggtattattatttttatgttaattaatattaaatttgttttttgattatattttttagttagtttattagtataaaattgagtttattaaatttttttaagaagtatgtttttaattgttgaaatgttatatttatttaggtatttgaattattatttaagaattattttagtttttttttttttttttagttttttataattttaatttttaattattaaaatttgatgagatttattttttttagggtttatagaattattttttttttttgtttttaaggtttttattttgttttagaattttttagatttttgagatagttattttttttttttttaggtttttttatttttttttattgatttattttaaagtaaatttgattcggttattatatattttttattgtttataggataaggttaaattttttagtaaattttaatttttttaagaattgttttttatagttagttttatgtgtttattttagaatcgattggattaatttaggagtagttttcggtaagtacggcgtttttttttattttttggttgtcgagggtcgtttttttagaaagtattttttattagttttaagttttttttttttagtaattttgatttttagttttaattttttttaggacgtgttttttatcgtattgttttttttagttttcgttttttttttaggtgtttattatttttttataaattatagttattgttatggtaataattttattattagaaggagttttatgtttagcggattagagttttttgagagtagggattgtggtattattttaagtattgaatttgttttagtaatttttaaataaatatatgttgaatgaatgaatgtagtaataggaatgttgagttaagttttgtttttgttttttgagacggagtttcgttttgttgtttaggttggagtgtagtggttcggttttggtttattgtaagtttcgtttttcgagtttagttatttttttgttttagtttttcgagtagttgggattataggcgttcgttattacgttcggtaattttttgtatttttagtagagtcgggttttattatgttagttaggatggtttcgattttttgatttcgtgattcgttcgtttcggttttttaaagtgttgggattataggcgtgagttatcgttttcggtttgttgagttaagtattaaattatataaaatataggaggagaggaaagtatttagagatacgatagggagaattatttgaaatagtgggattatagattatgtgaattgtgtagagaggtttaaatagtttggggtttttggagggaagggaggtttttgggtggtggagtattggtgtatagaaaaggagatgaattttgagagagaggttttttattgtgaagggtttggtgttggggttaaaggtttggggtttttatttgtttagtatggttttttaaattgtagggttttttttttttgagtggggggtagggggtgttttattttgttgtttaggttggttttaaattcgtgggtttaggtaatttttttatttcgtttttttaaagtgttgggatgataggcgtgagttattaagtttagtagtaggttgtaattaaattatgtatttatggtttttaaaattcgtttaggagttgttataggttcggcgttgtaaaagtaaatatgtttatttagaaaatggggataatttttatgttatagagttgtaaagattaaatgaattaatatagattaatatattgggaatagtgttaagtgtataagtattatgtaaattttagttattatttgttattattgtgtttgttgttatttttttttaggagtttttagggggttaagaagtggtgggaaagaaagaaatgattttaagagtatttaataagggttagaatggaagtgagtaaaaaatgttgaggtttatagtataggttgtattgcggggtttaaattttatgaggttagtagtatttagggtttgtgagttttttagagttgggttttggtggtcgagtttagttttgggggttattgtatttttttttttattataaaatggggtttggaggttcggggcggaagaaaggggtttataatattgtacggttagaggtcgagttaaggttggattcggttagatttttataggttttttttagtttttatattgttttagagtgtggggcgttcggttgggggcgaggtagcggaggtttaaagggggtcgaagttaattggacggtagttcgcgatgggaattacgttttttagtatgcgacggggtaaaggggttttttagtcgcgagtagcgtttcgtaggttttgttgggagtttttattgatttttgtttttttttttattttgattttcgtttttttgttttgggtttcgtttttttttgagagtcgatgatttggtagagtttcgcgagtcgttttttttttttttttttattggtttagtttagttgttattcggttgagaggaggagaagttgtttattgattggtggatttcgtttggcgttaattaggaaaggggggcggggtagtagttggttttattgagtcgttattatcgcgaaaggtcggtttggttgcgatagtttgggtaagaggtgtaggtcggtttggttttttgttattcggagttgggtaagcgggtgggagaatagcgaagatagcgtgagtttgggtcgttgtttcgaggttttcgttcggttttttttgtcgattcgttacgtttgtttggatttaatttttaggttgtcggcgttcgttcgttcgttggtttcgcggtgtgagagggaagtattcgtgtttgtggttggtggttggcgtttggagggttcgtatattcgttcggtcgcgtcgtttgttcgcggtagtcgcgtttttgaatcgcggagtcgtgtttgtgtttgattcgcgggcgtcggtggcgcgcggtcgaggtcggtgtcggcggggcggggcggtcgcggcggaggtagaggaagagggagcgggagttttgcgaggtcgggcgtcgttatggaattgggttcggagttttcgtatcgtcgtcgtatgtttttcgtttgtagtttttttttcgcgtcgtagttcgtcgtgaaggcgttatttggcgttttagtcgtcgggggattgtcgtttgttattaatttgatcgttattatggattagttgtagggtttgggtaggtaaggagagatcggcgggcggtgtttcgggtttttggtttcggtgtcggtttcggagagattaggttaggaaacggatcgggagaagggcgagattcgttcgttcgggttcgtcgttcggggatagtcgggttagggtttgttatgtgtattttcgttcgggcggaatgttgggcgggagaggtcgtcgggattttttaggggaagaggtggagatttttgggtttaagttcgagttaggtttatttttatttttttcggattgtttcgtattttttttttatttttatttttggaagttttttggaatttattttcgcggggaaaattaggtttttttaggtatttatttttattttttgttaaattatttttaggattttcgtttgttgtgatttttgtttttttttaataaaggattatggtatttttttttttggcgtttatgtaaaattattttagtttttcgttttgtgtatatttttgatgtttattttgttgtttttttaaggttaggtttttttatttaatttttagaaagttttttgggttttttttgatagtaaaaaatgtattttacggtgtttttcgcggaagagttattttttttttaatttttggtatttcgtttgttaagtatatgttttgtgcgttttttaatttttgaaaagtagaaagtgttttgtttaatttttatttcgattttgttttagtatttagaatatatgtttttattttaggaaatattttaatatttgttatagttattataatttgtaatgtggtttaaggttatgtttatttatttttttttttttttttgtttaagtgttaattgggtgtttagagtggtaaagtgggatttttgttatttgtggtgtggtttagaaatggtttttggtagtttggttgttttttaattttatggtttattttttgtatgtgattttttaattatattttataaattatttatggtttatttttgttggttttagt

SEQ ID NO: 16 - DNA, 6621 bp, Artificial Sequence
  chemically treated genomic DNA (Homo sapiens)
attgaaattaatagaaataaattatgaatgatttataggatataattaaaaggttatatgtaggagataggttatgagattaagaagtagttaggttgttagaaattatttttaggttatattataagtggtaaagattttattttgttattttgaatatttaattagtatttgggtaaaggagaaaaaaggagtgggtgggtatggttttggattatattgtaggttatgatggttatggtaaatgttggggtattttttaaaataaaagtatgtgttttaagtattgagatagagtcgggatgaaagttgaataggatattttttgttttttagaagttgggaaacgtataagatatgtgtttagtaaacgggatgttagagattgaagggaaagtagttttttcgcgggaaatatcgtgggatgtattttttgttattaggaaaagtttaggaagttttttgaaagttgggtaaaaagatttggttttaggaaagtagtagagtggatattaggaatgtgtatagggcgagggattgagatgattttatataaacgttaggaaagaaaatgttatggttttttgttgagaaggaataaagattatagtaaacgaagattttgaggatggtttagtaaagggtgaaagtgagtgtttagaagagtttgatttttttcgcgggggtagattttaaagagtttttagggatagagatagaaggagagtacggagtaattcgaaaggggtgaaggtgggtttggttcgggtttaggtttaaggatttttatttttttttttggaaggtttcgacggtttttttcgtttaatatttcgttcgggcgggggtgtatatggtaggttttagttcggttgttttcgagcggcgaattcggacggacgggtttcgtttttttttcggttcgttttttggtttgattttttcgaggtcgatatcgaggttaggggttcggagtatcgttcgtcggtttttttttatttgtttagattttgtagttggtttatagtgacggttaggttggtgataggcgatagtttttcggcggttgaagcgttaaatagcgtttttacgacgggttgcgacgcgggaggggggttgtaggcgaagagtatgcggcggcggtgcgggggtttcgggtttagttttatggcggcgttcggtttcgtagagttttcgttttttttttttttgttttcgtcgcgatcgtttcgtttcgtcgatatcggtttcggtcgcgcgttatcggcgttcgcgggttaaatataaatacgatttcgcggtttagggacgcggttgtcgcgggtaagcggcgcggtcgggcgggtgtgcggattttttaggcgttagttattagttataggtacgggtgttttttttttatatcgcgaggttagcgggcgggcgggcgtcggtaatttgaagattaaatttaaataaacgtggcgggtcggtaagagaagtcgggcgagagtttcgaggtaacggtttaggtttacgttgttttcgttgtttttttattcgtttgtttagtttcgggtagtagaaaattaagtcgatttatattttttatttaggttgtcgtagttaggtcggtttttcgcggtaatagcggtttagtggggttagttgttgtttcgttttttttttttagttggcgttaaacggaatttattaattagtaagtaattttttttttttttaatcgaatggtagttaggttgggttaatgagaggggaagaagaaagcggttcgcgggattttgttaggttatcggtttttagaagggggcggagtttagagtagaagagcggggattaaaatgagagggggagtagaggttaatgaaaatttttagtagaatttgcgaggcgttgttcgcggttgaaaggtttttttgtttcgtcgtatgttgggaagcgtagtttttatcgcgagttgtcgtttagttagtttcggttttttttgggttttcgttatttcgtttttagtcgggcgttttatattttgaggtaatgtggaggttaaggaagatttgtggaggtttggtcggatttagttttggttcggtttttaatcgtgtagtattgtggatttttttttttcgtttcgggtttttaggttttattttataatgagggagggaatgtaatgatttttaggattggattcgattattagggtttaattttggagggtttatagattttgggtgttgttggttttatgggatttgaatttcgtagtataatttgtgttgtgggttttagtattttttgtttatttttattttagtttttattggatgtttttagaattattttttttttttttattattttttagttttttgggagtttttagagagaaataatagtaaatataataatagtaaataatagttaaagtttatataatgtttatgtatttgatattgtttttagtgtgttaatttgtattaatttatttaatttttataattttgtgatataggaattatttttattttttaagtgggtatatttatttttatagcgtcgaatttgtggtagtttttagacggattttgagggttataagtgtatgatttaattgtaatttattgttgggtttagtggtttacgtttattattttagtattttgggagggcgaggtgggaggattgtttgagtttacgaatttgagattagtttgggtaataaagtgagatattttttgttttttatttaaaaaaaaaaaattttatagtttgaaaagttatgttggataggtggaaattttaaatttttggttttaatattagattttttatagtgaggaattttttttttaggatttatttttttttttgtgtattagtgttttattatttaggaattttttttttttttagaaattttaggttatttaggtttttttgtatagtttatatggtttgtggttttattgttttaaatagttttttttgtcgtatttttgaatatttttttttttttttgtgttttatgtggtttaatatttggtttaataggtcgggagcggtggtttacgtttgtaattttagtattttgggagatcgaggcgggcggattacggggttaggagatcgagattattttggttaatatggtgaaattcggttttattaaaaatataaaaaattatcgggcgtggtggcgggcgtttgtagttttagttattcgggaggttgaggtagaagaatggttgaattcgggaggcggagtttgtagtgagttaagatcgagttattgtattttagtttgggtaatagagcgagatttcgttttaaaaaataaaaataaaatttggtttaatatttttgttattgtatttatttatttaatatatgtttatttaaggattattagaataaatttagtgtttgaaataatattataatttttgtttttagggagttttggttcgttgagtataaagttttttttaataatggaattattattatgataatagttgtggtttgtggagggatggtgggtatttagaggaggggcggggattggggaaggtagtacggtggggggtacgttttaaaggagattaaaattaaaggttaaggttgttggagaaggggagtttggggttggtgggaagtgttttttaaggaaacggttttcggtagttaggaggtgaggaggaacgtcgtatttgtcgggagttatttttgagttgatttagtcggttttagaatgggtatatgggattggttgtgagggatagtttttgaaaggattggagtttgttgaagagtttggttttattttgtggatagtggagggtgtgtgataatcggattagatttgttttagggtggattagtggaggagagtggggaggtttgaggaaaaaggaggtggttgttttaaaagtttgggagattttgaagtaaggtgggggttttggagataaaggaagggaatgattttgtgagttttgaaggaggtagattttattagattttgataattgagagttaagattgtagggggttagagggaagggaggaggttagaatgatttttaggtaatgatttaagtatttgggtggatgtaatattttaataattggaggtatattttttggaggaatttgatgagtttagttttgtgttggtggattggttggggggtgtagttaggaggtagatttggtgttgattagtatgaagatggtaatgtttattgaggatgtataaagggtttttaggattttggatttggggagtattagtattgaggatttgatgtagtgagataggatcgtaaagttggggttgagatagaaattataagggagtagtcgagtttatagtttagaggtgtatttaggagagttattgaaggtggttagaatgaggttataggtaattatggaaattatgtaggaaggcgaggaggtggttatagaaggttatgggaagggaaaagttggtatagaagttataatatagtttaagtgtgttaaaatgtatgtatataaatatttatggttatgttaattattttagttttaaatagaaagtaattttaatgtttattaataataaaatgggtaaatagaataaagttattttatatagtgatgaaaaggatagaagcgttatttatagtaggagtgaattttatattaattgttaaatataagaaggaagatataaaagagatatgttgtttaggtttggtttatatttgtaattttagtattttgggaggttgaggtaggcgaattatttgaggttaggagttcgagattagtttggttaatatagtgaaattttatttttattaaaaaaaaatatatatatatatatatatatatatatatatgtgtgtatatatatataatatatatatatgtgtatatatatataatatatatatatatgtgtatatatatatatatatatatgtatatatatatatatatatatatgtatatatatatatatatatatatgtatatatatatatatatatatatatgtaatatatatatatatatatatgtaatatatataaatatatatatatatatatatatatatatataaaaattagttatgtatggtggtgtataattgtaattttagttattatggaggttgaggtatgagaattgtttgaatttaggaggtggaggttgtagtgaatcgagattgagttattgtattttagtttgggtgatagggcgagatttcgttttaaaaaaaaaaaaagttagttatggtattagttattttttagaaagatggtggtgattgtaaggggttatgaaggggatattggtaattggttatattttgttttttatttattttttattttttgagatagagttttgttttgtggtttaggttggagtgtagtgatatgattatggtttattatagtttcgaatttttgggtttaagtgatttttttattttagttttttgagtagtttgaattataggtatgtatttataaatttagttaattaaaaattttattttttattttggttgggtatggtggtttacgtttgtaattttagtattttgggaaatcgaggtgggtggattatgaggttaggagttcgagattagtgtggttaatatggtaaaatttcgtttttattaaaaatataaaaaattagtcgggtgtggtggtatacgtttgtaattttagttatttgggagattgaggtagtagaattatttgaatttaggaggcggaggttatagtgaattgagattatgttattgtattttagtttgggtaatagagtaagattttgttttagaaaaaaatatatgtataattttagagacgggagtttaattatgatgtttaggttggttttaaattttcgagtttaagcgattttttcgttttggatttttaaagtgttagtattatatgtatgagttattgtatttggttattttttattttttgatttgggtgttggttatttgagtgtgtttattttgtggaaatttattgagttatatatttaagatttgttagttgttttgtatgaatggtgtattttaatgaaatgtttattattagtgataaaaagtttttttttgatgttatttttttttttaattatatttattttttttttttatagtaaaatttttggtcgggtatagtgatttatatttgtaatttcggtattttgggaggtcgaggttaggagtttaaaattagtttggttaatacggtgaaatattattttggtcgggtatggtggtttacgtttgtaattttagtattttgggaaatcgagatgggtggattatgaggttaggagtttaagattagtttggttaatatagtgaaattttatttttattaaaaatataaaaaattagtggtgcgtggtggtgggtatttgtaattttagttatttgggaggttgaggtaagagaattgtttgaatttgggaagcggtggttgaagtgagtggagatggtattattgtattttagtttgggtgatagtgcgagatttttttttaaaaaaaaaaaaaaaaaagaaaagaaagttttatttttattaaaaatataaa

SEQ ID NO: 17 - DNA, 5310 bp, Artificial Sequence
  chemically treated genomic DNA (Homo sapiens)
aaaaaaaaaaaaaaaaaaattagaaaattaaaaaattaggtcgggtgtagtggtttatgtttgtaattttagtattttgggaggtcgaggtgggtagattatttgaggttaggagtttaagattagtttggttaataaggtaaaattttatttttattaaaaatataaaaattagttgggcgtggtggtattcgtttgtggttttagttatttaggaggttgaggcgggagaatcgtttgaatttaggaggcggaggttgtagtgattttagatcgtattattgtattttaatttgggcgatatagcgagattttattttaaaaaaaaaaaaaaaaattagttaggcgtgatggtatatatttttatttttaattatttgggagggtgaggtgggaggatcgtatttgagtttgataggttgaggttgtagtgagttgtgattatgttattgtattgtatttttgttggggtgatagtaagattttgttttaaaaaaaaaaaaaaaaaaagtttgattgttttagatttattttataatgattaatttgaattaagtcgttttattttttgtttggataattgtaatggagtttttattagtttttttgttttttttgttttttataatttttttaatattatttttttgtttaaaattaatagtggttgttttttttggttttttaagtaggggttaaagtttttataatggtttatatgttttataaggtgtgattttggtttttttatattttgatttattttttatttgttttttttattttagttatattggtttttttgttgttttaagtaatttattgtttcggggtttttgttttgttttttttgtttggaatgttttttttaaagcgtggtttttttattttttttaagtttttgttttaatgttattttatgagtaaggtttttgggtttttttgtttgtttttcgagtttttattattttttgtttttttgtgttttgttttgagtttggggagaatgatttttttagaaagtaatttgggtttttttgttttaggtttttgagtgggtttggtgaatgggaggtgttattaggagatgaaaggtaagaggggagagatgttggggtattttttttttttgtattttttttgttttgttttgggtagtggttgtgtttttttcgattatagttgtatttgggaatggattttatatttttttgtttttttatttacggatttttaataatatgattttttttttgatttttagtttttaaagtagttatgttttttagtttttgtttgtttttttggtgttttaatatttttgttgtttgggttttttgaattttgtttatttttttcgttttttttttaagatttgaatttttcggttgggcgtagtttttaacgtttgtaattttagtattttgggagatcgaggcgggtagattgtttgaggttaggagtttgagattagttcggttaatatggtgaaattttgttttaattaaaaatataaaaattagttggggatggtggtaggtatttgtagttttagttattcgggaggttgaggtaagagaatcgtttgaattcgtgaggcggaggttgtagtgagtcgagatttcgttattgtattttagtttgggtatggtagcgagatgttttaaaaaaaaaaaaaaaagtgtagttgttatggaaaatagtatggtgtttttttaaaaaataaagtaggttggagtgtagtggtgtgattatagtttattgtagttttaattttttgggtttaagttattttttcgttttagttttttgagtagttgggattataggttcgtgttagtaagtttggttaatttttttttttgtattttttgtagagataggggtttcgttgtgttgtttaggttggtgttaaatttttgggtttatttatttattttagttttttaaatgggattataggcgtgaattattgtttattgcgtcgggtttttttgtttttgtttttgtatacggtatatgttattatttaatatattatatttttacgtatttttttatttttttttattttttatattttggatggtaagttcgaaggcgtagggatgtttgtttattgttgtattttaagtggttggtatatcgtcggttgttagtaaatgtttttgaaatgaatgaatgagtgaatgatcgataaggggagttaaggggaaggtagcggtgcggttcgcgtcgtaggtagaagagttgattttttaattttcgttttttttttcgttttcgttcggaatgttgagtgttcgagaaggaggcggaaatgagcgcgtttaatagtttattagtcgggtgtttatttaattagggtttgtatttcgaggttcgtttgtgtttaatcgttcgtttaatggtttcgtttggtttcgggcgggcgcgggggaatttgcgaggcgagcgtaggtttggttattttgtttcgtcgggggtttattttattgcgtcgcgcgggtgcgcgtagatttgattttttttcgggtataaaaagcgttttgcgggagatttaggtcgggagggcgcggagtttagcgagtagttttaggtttttttaatcgcgtggtttatttttagttttagttttagttttagttgttgggtttattcgtcggttaagggaatgttttcgagatattagatgttagttgttcgttgtatttttagttatgaaattggaggattataacgttttttatttttttaatttaggggatgtggggatgttagaaagagagacggttcgttagatatttgagagtaataatattaggtagtatttgggtatttgttgtgtgttagatatgatgtttagcgttttaaattttttaatttatttaatatttatttatgagagggtaaaatattaagattataatagttttatttgatagatgtagaattgaggtttagggggtttattttattttttcgaggttttagcgttattaaggggtgggatttggatttgaatttaggtggggtcggttttaagggtttatgttaggtttgagagagtaagatttttattttcgtaacgtaagtaatttatggtttagttataggtttggcggggaggaggacggatagattattaggttagttttggaaggttaaagaatttgttatttaaaattttaggttgggtttcgttttttacgtttgtaattttagtattttaggaggttaagggaagcggattatttgaggtcgggagttcgagattagtttggttaatatagcgaaatttcgtttttattaaaaatataaaaattagtttggtgtggtagtgggcgtttgtagttttagttattcgggaggttgaggtaggagagtcgtttgaatttgggaggcggaggttgtagtgagtagagatgacgttatcgtattggacgatagtgagattttattttaaaaaaataaataaaataaaaaaatttttttagtttttagttcgttttttaaatttttaaatttgagttggggacggggagggagaaggattaggaggtggtatttagggttttttaaggtagtagtagaaggtgaaggaggagtgaggggataggtgagagagattgatcgggaaagtttagtttcgtggggaagggtttgtggggtagtgattgagatttaggatcgtttttatggttagagtttatttgtgtgtagtaagaggaaagtatttcgtgtttaacgtagtggaatgagagtaacgtagaagaataacgaattttaggtttggcgtttattttttaggaagggtgtgggagagttgttttttaagggagattttttggaggttgttttgcgtagtaagtagtttttatttagattatatatagtattttagattaattttaaaatttttgcgttttaaaaattgtttttatttatattttatagaaagttgagaaagtgttatttatatggggggtaggggtgttggagattatgagattaataataatttttttagttcgtattttttggtattattatagtttttaaattttgggattttttcgattagtttttttttgtttagttgtgaaatggaagaagcggttcgggtgtggcggtttatgtttgtaatttgagtattttgggaggcggaggatcgtttgagtttagaagtttaagattagtttgggtaatatagggtgattttttatttttttttcgttttattatatcgttataaaaaatttttaaaaattagtcgggtgtggtggcgtaagtttgtagttttagcgggagttgagggaggagaatcgttttagttcgggaggtcgaggttgtagtgagtcgagatcgcgttattgtatttttgggcgatagagcgagattttgtttttaaaaaaaaaaaaaaaagaaaaaagaggaagttgtatttaatttagaaacgcggtttttcgggatttgttagttttatatttcggaggatttttttcggcgggttggtacgggaggtggagaaagaggtttgggcggtttcgttgtagtcgcgtgtgggaggacgtacgggtttgttttaaagttttgggataatagcgttttcgggggataatgaatgcggagttttcgtttttagtcgattttagatgtgtttttattttttttcgttgtagtcgtaaggtaaggaaatattttttttttcgtattgaggaggttgaggagtgtattgggtgttttttttttttttaatttagaattgcgagatagaggttgagtttttgtaaagaatagttttagaaaagttaggagagcgtaggagggtattcgggaggttaggaggggttcgttggggttttaatcgtatttatatcggttttatttgcgagggggcgggatttcgtggcgttggattaattagtatttatttgcgtttatttggttttttttcgttggttttcgggggttgcggtgtttaaaggggtaagagttgagcggaatatcggttcgtcgtcgcggtagttgttttatttttttttttgtagttatggggttttttcgtggatttttcgcgttttttttttttttttaggtattttatagtttcgtcgtggtttcgatcgggatcgttttttggggggcgggcggggttcgtatggggtagtggcgtcggggagagcgcggggttgcgttttttggggttaagggagtttcggaaggttcgtgaggattttgcggtgtggggagtgtagggtcgggtacgtttggatttagttttttttattttttgttttcgggcgtagg

SEQ ID NO: 18 - DNA, 5310 bp, Artificial Sequence
  chemically treated genomic DNA (Homo sapiens)
tttgcgttcgagggtagagagtgaaggaggttgggtttaggcgtgttcggttttgtattttttatatcgtagggtttttacgggtttttcgggatttttttggttttagggagcgtagtttcgcgtttttttcgacgttattgttttatgcggatttcgttcgttttttagggagcggtttcggtcggggttacggcgaggttgtggagtatttggagaaggaggagagacgcgagaggtttacgagggagttttatggttgtagagagaggggtgaagtagttgtcgcgacggcgggtcggtgtttcgtttagtttttgtttttttgagtatcgtagttttcgggagttagcgggaggaggttaggtgagcgtaggtgggtgttgattggtttagcgttacgaggtttcgttttttcgtaggtgggatcgatgtgggtgcggttgaggttttagcgaattttttttggtttttcggatgtttttttgcgtttttttggtttttttggagttgttttttatagggatttagtttttgtttcgtagttttgggttagaggagaaaagaatatttagtgtattttttagtttttttagtacgggaagagaaatgtttttttgttttgcggttatagcggaaaaaagtggagatatatttgaagtcgattgaaaacggaggtttcgtatttattatttttcggaggcgttgttattttaaagttttgaagtaggttcgtgcgtttttttatacgcggttatagcggggtcgtttaagtttttttttttatttttcgtgttagttcgtcggggaggatttttcggggtataaaattagtaggtttcgaaggatcgcgtttttgaattggatataattttttttttttttttttttttttttttttggagatagggtttcgttttgtcgtttaggagtgtagtagcgcgatttcggtttattatagtttcgatttttcgggttgaagcgattttttttttttagttttcgttgagattataggtttgcgttattatattcggttaatttttaaaaattttttgtagcgatgtggtggggcggggggagggtggagggttattttatgttgtttaagttggttttgaatttttggatttaagcgatttttcgttttttagagtgtttaggttataggtatgagtcgttatattcggatcgttttttttattttatagttaaataaagggaagttagtcgagaaagttttagagtttggaagttgtagtggtgttaaagggtgcgagttaagagggttgttattagttttataatttttagtatttttattttttatataaataatatttttttaattttttgtaaaatgtaaataaagataatttttaaaacgtagaggttttgaaattggtttgaaatattgtatataatttgggtaaaaattgtttgttgcgtaaagtagtttttagagagttttttttggaaaatagtttttttatattttttttaggagataaacgttagatttgggattcgttgtttttttacgttatttttattttattacgttagatacgaagtgttttttttttgttgtatataagtgggttttggttatgaaaacggttttgagttttaattattattttataagtttttttttacggagttgagttttttcggttagttttttttatttgtttttttattttttttttattttttgttgttgttttgagaagttttggatgttattttttggttttttttttttttcgtttttagtttagatttaggggtttgaggaacggattggagattggagaggtttttttgttttgtttgtttttttgagatggagttttattgtcgtttagtacggtggcgttatttttgtttattgtaattttcgttttttaggtttaagcgatttttttgttttagtttttcgagtagttgggattataggcgtttattattatattaggttaatttttgtatttttagtagagacgggatttcgttatattggttaggttggtttcgaattttcgattttaagtgattcgttttttttggttttttaaagtgttgggattataggcgtgagaaacggggtttagtttggagttttaaatgatagattttttgattttttagggttaatttggtaatttattcgttttttttttcgttaggtttgtggttaagttatggattgtttgcgttgcgagggtgggggttttgtttttttaggtttagtatgggtttttaaggtcggttttatttgggtttaaatttaggttttattttttagtagcgttgaagtttcggggaagtaaaataaattttttgggttttagttttgtatttgttaaatggggttgttatgattttagtattttatttttttatagatgagtattaaataaattagaaggtttaaaacgttaaatattatatttggtatatagtaagtgtttaaatgttgtttggtattattgtttttagatgtttggcgagtcgtttttttttttagtatttttatattttttgaattaagagaatgagaagcgttgtaattttttaattttatggttgagggtataacgagtaattggtatttggtatttcgggagtatttttttagtcggcgggtgagtttagtagttggggttgggattgaggttgggggtggattacgcggttgggaaagtttggggttgttcgttgagtttcgcgttttttcggtttggatttttcgtagggcgttttttatgttcgaggggaggttaggtttacgcgtattcgcgcggcgtaatggagtgggttttcggcgggatagggtggttaggtttacgttcgtttcgtaggttttttcgcgttcgttcggagttagacgaagttattaggcggacggttaaatataaacgagtttcgggatgtaggttttaattaagtaaatattcggttggtgggttgttgagcgcgtttattttcgtttttttttcgggtatttagtatttcggacgggggcggagagaggagcggagattggagagttagtttttttgtttgcgacgcggatcgtatcgttgttttttttttagttttttttgtcggttatttatttatttatttattttaaaaatatttgttgatagtcggcgatgtgttaattatttaagatataatagtgaataaatatttttgcgttttcggatttgttatttagagtgtggagggtagaggaaagtgaaaaaatacgtggaaatataatatgttagatggtaatatgtatcgtgtataagaataaggataggggggttcggcgtagtgggtagtggtttacgtttgtaattttatttagaaggttgaggtgggtggatgagtttaggagtttgatattagtttgggtaatatagcgagatttttgtttttataaaaaatataaaaaaaaaaattagttaggtttgttggtacgggtttgtagttttagttatttagaaggttaaggcgggaggatagtttgagtttaggaggttgaggttgtagtgaattatgattatattattgtattttagtttgttttattttttgaggaaatattatattgttttttatagtaattgtatttttttttttttttttgagatatttcgttgttatgtttaggttggagtgtaatggcgagatttcggtttattgtaattttcgttttacgggtttaagcgatttttttgttttagtttttcgagtagttgggattataggtgtttgttattatttttagttaatttttgtatttttagttgaggtagggttttattatgttggtcgggttgattttaaatttttgattttaggtaatttgttcgtttcgattttttaaagtgttgggattataggcgttagagattgcgtttagtcgggaggtttaagttttaaggaagggacgagagaaatgggtagggtttagggagtttagataataggggtgttgaggtattagagagataaataaaagttggaaggtatgattattttgagaattgaaggttagagaggaaattatgttattggaagttcgtggataaggggatagggaagtgtgggatttatttttaaatgtagttgtgatcgaggaaggtatagttattgtttagagtagagtagagaaagtgtagggaaaaaaaatattttagtatttttttttttttgttttttattttttggtggtattttttatttattaaatttatttagaagtttgaggtaagaaagtttaggttgttttttagaggggttattttttttaggtttaggatagggtatagaagggtagaaaatgatgggaattcggagagtaaataagaaagtttagaggttttatttataaagtggtattagaataaagatttgaaggaagtgaaggaattacgttttggaaagagtattttaggtagagaaaatagggtagaggtttcgagatagtagattatttggaatagtaagaaagttagtgtggttggagtagagagagtaagtaggaagtgagttagagtatgggagggttaggattatattttgtagagtatgtaggttattgtaagaattttggtttttatttggggaattaggggaggtagttattgttggttttgagtagaggagtgatgttgagaaaattataagggataagggaagtagggaggttggtgggggttttattgtagttatttaggtaaaagatgaaacggtttggtttagattggttattatggagtgggtttgaaatagttagattttttttttttttttttttgagatagggttttgttgttattttagtaggggtgtagtgtagtggtatgattatagtttattgtagttttaatttgttaggtttaagtgcgatttttttattttatttttttaagtagttggaaataaaggtgtgtgttattacgtttggttaatttttttttttttttttgagatggagtttcgttgtgtcgtttaggttagggtgtagtggtgcgatttgggattattgtaattttcgttttttaggtttaagcgattttttcgttttagttttttgagtagttggggttataggcgggtgttattacgtttagttaatttttgtatttttaatggagatggggttttgttttgttggttaggttggttttgaatttttgattttaggtgatttgtttatttcgattttttaaagtgttgggattataggtataagttattgtattcggtttaattttttaattttttaattttttttttttttttttt

SEQ ID NO: 19 - DNA, 6050 bp, Artificial Sequence
  chemically treated genomic DNA (Homo sapiens)
tatttttttttgttaaaaagttaagagttgtttagaaggaaaaaatagttttttttaaagaggttaaatttttagtattaattagttgtagtagtggtatgtgtgtgtgtgtggggggggggtggtatggtaattttgtgtttttagtgttttaaataggggtaatttttttgtttacggtttgagttatcgaatgagtaatttcgattttttaagattttttattgggtttacgtgtgtgtgagttttataggaattgtggaatgttttttttttttgttgggtttagatatttagaatgaataaattaaagggtagtggtaatatggttattgttattgtagataatgtggtatttatatatgggtattagttgttttttttatggggtttaggaataagggtaagtttgattttttattatgaattattggggtgttttttatatatagaggttgtattagttgaaaatagtttaaatattttgtaattttgttttttttaatttttgtttatttatattttagaataaaagagtttgtttagtttttttaaagatttaaagaatattatttatttgttttttaagtatttaaaaagtataatcgtttatatttattttggttggatgaggatatgtatttatttatttatttaagagatatttattgttagatttggtggtttacgtttgtaatttcggtattttgggaggtagaggtgggaggattatttgaggttaggagtttaaggttagtttgggtaatatagcgagattttatttttataaaaaataaaaaattagttgggtatggtggtatgtgtttgtggttttagttatttgggaggttgaggtaggggtattgagtttaggagtttaaggttgtagtgagttataattatattattgtattttagtttgggtaatagagtgagattttgttttaaaaaaaagaaagaaaaagaaaaagaaaaggggtatttattgaatatttattatgttttaggtattgtgttagattttaagtgaatattagtatatgaataagataaaggcgaaaagttattaaataagtttaagttgatttcggtatatgtatttttttgatttttggtttcgtgttttgattataattttttattattagattagatttttttaaataaataattatttttgtatgttggggatgggttgtgtgcggtagtatttacgtaggcggtatagatagtagttttttatttaatgttgtaataatattaggttaaataatgtgtattgattttaaaagtgtggggttaggttttttttaagtgttatagggagagtgtaaagtaggaaaagtttatcggatgaggaaatattgtagagggaaagtgaatttttttttaatttgggttaaaatttagatgtggaattttatttttttttttatttttggatttttagataggaggaatttagtatatagataattatgaattatatatattttggttttatatgtttagatttgtttagagtatgaaatttttgttttgttggaaggtagcgtcgtgtttacggaggtatataagtatttgttttaaagttattttgatttgtagatttgtaaatggtaaaaataattttatatgtttgttttgatttgtttttatttttaggttattttgtgtgagttttattttttagaatgtgattttgtagttttgaaatggatattatgagtagattgagatgtgagaatatgttagaatgattataggttcggatgttagtggggtaggagagggagtttgagattgtattggtttatattgtggtttttggttgagtatttggtttgtttggatgatgttttggttttatttaatttttattattttattatttagaggatagaggatttgagttttatttttgtattgtagttattttttttgggatttgtttttaagtttttttttgtgttgtttggtattttttttttattttttttaaattatttattgttattttgtaagttcgattgatttgttggtttttttatgagattggaatttttttgagggtcgggataggtttattttttttattatagtgagtattagtttttagtttagttaatagttttgttaaataaataattgaataaaattatttgttaaataatggtttgttttttttagaggatggatttagtttgttttttttagaggatggatttagtaagtttttaattttggttataatggtgttagaaggaaagagttaagttatttggaggaaataggtttatttaaagatttttttttttttttttttttttaattggtaaaggtaggataagtgtatttgagataaattttggatataaaattttgatatattttttaggtattggtcgagatgttttggatttgaaagggaagtaaattaaattattttaggtttttttttttttttttttggagatagaattttgttttgttgtttaggttggagtgcggtggtacgatttcggtttataggaatttttgtttttcgggtttaagtaatttttttgttttagttttttgagtagttgggattataggcgtgcgttattatattcggttgttttgtatttttagtagggatagagttttattatgatggttaagttggtttcgaatttttggttttaagtgatttattcgtttcgggtttttaaagtgtaggaattataggagtgagttatcgtatttagttaggttttttgttaagtggtttgagatttagttgtgaatggtagttatggttagatttaggaatttaaagtttgatttattttgtttgaagttaatattaataataagagagatgtatttggttttataatttttttttttttcgtttttttttttttttttgtaattaaggatagaattagaagtatcgaaggtcgtagaattgttttaggatttagagtagttttaaggaatttgtgtttacgtattatgtgtgttttttcgtttttttttttttttatgagtgagaaaaaaaagcgtttaaatttttattaatataaattaatgatatataatgatgaaattttgtttttatttttgtttgtgatagggaatgtaaaaatagtaagtggtttagttttacgaattttcgttttttgtttttttcgtttttgtcgggttggatttttaagaatggaggttagcgtatagtttcgcgcgggtcgtttagttttcggattcggcggatgatgttaggcgacgggagcggtcgcggtcgggtcggggaggtcgcggtttaggggagttgggagggagggtggtttcgttaggtcgacggcgcgttcggtcgcgcggcgttgtttggagacggttttggcggcgttgtgttgttgtaaatagtcgtttttttgttattatttatagtaggattttttggttttcgggcgcggcggttggaggtaggtttgcggttcggtttttcgcgcgtttcgaattattcgttcgtcggttttattttgtttcgtttttttttaggtgtttatcgcgggtttcgattttcgggttcgaagagtggagaagggaagatcggggttgtgcggggatatgcgttttcgcgttttggaggtggttagcgcgttggggttgagtttcggtagcgtgatttcggttgttttacgtagtagggtaggagattggggggcgtggtatattttggagtattttgtttttttaaagtttcgtgttttaggacgtggagtcgtttttggggttttagtagtcgaggtatttcgtttaggcgtagttggatattgtttttttagttttcgttttttattttttaagttcgcgttggaaaattattcgttgcgggttttcgtaagtatagttttttggcgggatcgaattagtttttagcgtagatttgagtttttcgtaggaagtatatttcgttttgttatttcgaattgattattttgtttatataattatatttcgtattttttatttttggggtttagtttagaatcgggtagatattttttttaaatgttttcgtacgtaggttttgtatagtgtttatttgttggtgttttagggatttgatagtttttttaatatttttatatatggtcgagaaaaataaataaataaatgcgttgttttttttaaaaaaataaataaataaagtatttagtatcgtaaagtaggttatcgtatttttttattttggattttttattttttgtttttaaacgtaggaatagtgttagtattgttcgagttcgagggttggaggttaggggatgaaggtttgtttttacgttttgtattgaattagggttagaattggggatgggggtaggggcgtattttttcgggagtcgaggtttaagttttcggggttttgtattcgatgtcgttttttttatttttgagttttagaattgtttttagttttcgtataagggtaaaaaggcgttttttgttttatttttttcgatttcgggaataagggttcgtattgaattaggtgcgaatgtttttttttattttgcgtcgttttcgtttttttttttttagtcgcggttttcgttttttttcgtattgtattttcggtgttggttgtagttcgcgagtagttttcgttaatttttttttttttatataggatgtttatattaggatatttgcgttagtaggtttttacggtttttttttgtagttttggggggagttattttcgaaattttttattttggggggtttacgagatttttgagataggaattgcgaaatgtttacgagattaggatacgcgttaaggcgggggtagggagttgcgagcgttggggacgtagtcgggcggtcgtagaagcgtttaggttcgcgcgttatttttttggcgttatcgtggttgagttcgtgacgtttatatttatttataaaacgtttgttataaaagtagtggttgcggcgtttcgtattttaatcgtatttgtagcgagtatttgagaagttaagattgagtcggcggtcgcggcgtagcgaacgagtagtgatcgtgtttttatttagttttgttttatagcgtttatttgttttcgtttttcggtttttcgttcggttttgtttaatcgttacgatgatgttttcgggttttaacgtagattacgaggcgttattttttcgttgtagtagcgcgttttcggtcggggatagttttttttattattatttattcgtagattttttttttagtatgggttcgtttgttaacgcgtaggtaaggttggtttttcgtcgtcgcggggtcgggggtttggggtcgcggaggaggagatatcgggcgggacgttttagtagatgagtagggggtttttttgtgtttggagggaggttgtcgtggtcggagcggtgtcggttcgggggttcgggatttgttttgagcgtacgtacgtttgttatagtaagaattggtttttttttcgggaggtaggttcgttttgagtaatttttggtttgtattttaggacggatttttgatattagttggagtagacgtgttttaagtataaattcgttaattagagtttggttttttcggggaggtggtagaaagcggtaattttttttttttcggtagtttggagtacggaggagggatgagggaggagggtgtagcgggcgggtgtgtaaggtagttttattgataaaaagcgagtttattttggagatttcggagcggcgtttgcgttagcgtagacgttagggatatttataataaatttttttttaagtaagtgatgttgaagggataacgggaacgtagcggtaggatggaagagataggtattgcgttgcggaatgtttgggaggaaaagggggagattttttatttaggatgagggatatttaagatgaaatgttcgtggtaggatcgtttttttttattgttgtatgcggtattgggaattcgttttatttgtgttcggaatttgttcgtttacgtcggttttttttttttgttttgttttagg

SEQ ID NO: 20 - DNA, 6050 bp, Artificial Sequence
  chemically treated genomic DNA (Homo sapiens)
tttagaataaaatagaaggggaaagtcgacgtgagcgagtaggtttcggatataggtggggcgagtttttagtgtcgtatgtagtagtgaagagaaacgattttgttacggatattttattttaaatgttttttattttggatgaaaggttttttttttttttttttaggtatttcgtagcgtagtgtttgttttttttattttgtcgttgcgttttcgttatttttttagtattatttgtttgaaagggggtttgttataaatatttttgacgtttgcgttgacgtaggcgtcgtttcggagtttttagaatgaattcgttttttattaatgaaattgttttatatattcgttcgttgtattttttttttttatttttttttcgtgttttaggttgtcgggggaggggggattgtcgttttttgttattttttcggagaagttaggttttagttagcgagtttgtgtttgggatacgtttgttttagttaatgttagagattcgttttggagtgtagattagaggttgtttagaacgaatttgtttttcgaagggggaattaatttttattatggtaagcgtgcgtgcgtttagagtaagtttcgagttttcgagtcggtatcgtttcggttacggtagtttttttttaggtataagggagttttttatttatttattggagcgtttcgttcggtgttttttttttcgcgattttaagttttcggtttcgcggcgacgggaagttagttttatttgcgcgttgataggcgagtttatgttggagaaggagtttgcgggtgagtggtagtaagagaggttattttcggtcggggacgcgttgttgtagcgggaggatgacgtttcgtagtttgcgttgaagttcgagaatattatcgtggcggttaggtaaagtcgggcgaggggtcgaggggcggagataggtgggcgttgtggagtagagttgggtaggagtacggttattgttcgttcgttgcgtcgcggtcgtcggtttagttttggttttttagatgttcgttgtagatgcggttggagtacgaggcgtcgtagttattgtttttataataagcgttttatgaatgagtgtaaacgttacgggtttaattacggtggcgttagaggggtggcgcgcgggtttgggcgtttttgcggtcgttcggttgcgtttttagcgttcgtagttttttgttttcgttttggcgcgtgttttaatttcgtgagtatttcgtagtttttgttttagaggtttcgtgggttttttaagatgaggggtttcggggatggttttttttagggttatagggaaaggtcgtggaaatttgttgacgtagatgttttaatatggatattttgtgtaaggggggagggattgacgggaattgttcgcgggttgtagttaatatcgagggtgtagtgcggggggaggcgggggtcgcggttgggggaggggaggcgggaacggcgtagaatgagagagaatattcgtatttggtttaatgcggatttttgttttcgaggtcgggggggatggggtagagagcgtttttttatttttgtacggaaattgaagatagttttgaggtttagagataggagaaacggtatcgagtataggatttcgaggatttaagtttcggttttcgaaggaatgcgtttttatttttatttttaattttagttttaatttagtgtaaagcgtggaagtagatttttattttttaatttttagttttcgggttcgagtaatattagtattgtttttgcgtttggaagtagaaagtggaggatttaaaataagagaatacgataatttattttacgatattgggtattttatttatttatttttttaaagaagatagcgtatttatttatttatttttttcggttatgtgtgggaatattaaggaaattgttaaatttttgagatattagtagataaatattgtgtaaaatttacgtgcgaagatatttgaagggggtgtttgttcggttttgagttgggttttaggggtagggagtgcgaggtgtggttatgtgggtagggtggttagttcgggatgataaggcggggtgtgttttttgcggggaatttaaatttgcgttgagggttggttcggtttcgttaggaagttgtgtttacgggagttcgtagcgggtgattttttagcgcggatttggagggtggaggacgggggttggaaggatagtgtttagttgcgtttgggcggaatatttcgattgttgggattttaggagcggttttacgttttggaatacggggttttggggaggtaaggtgttttagagtgtgttacgttttttaattttttgttttgttgcgtaggatagtcggggttacgttgtcggggtttagttttagcgcgttggttatttttagggcgcgaagacgtatgttttcgtatagtttcggtttttttttttttatttttcgggttcgggggtcggggttcgcggtgggtatttggagaggggcgaggtaggatgaggtcggcgggcggatagttcggggcgcgcggggagtcggatcgtagatttgtttttagtcgtcgcgttcgggagttaggagattttgttatagatagtaatagggaagcggttgtttatagtaatatagcgtcgttagggtcgtttttaggtaacgtcgcgcggtcgggcgcgtcgtcggtttggcgaggttatttttttttttagtttttttgggtcgcggttttttcggttcggtcgcggtcgttttcgtcgtttgatattattcgtcgggttcgggggttgagcggttcgcgcgaggttgtgcgttaatttttatttttagagatttaattcggtaggagcggggagggtaggaggcggggattcgtggaattgggttatttgttatttttgtattttttgttataggtagaggtgaaaatagaattttattattgtatgttattggtttatgttggtgggaatttaggcgttttttttttttatttataaaaagggagggaaacggaaaaatatatataatacgtaaatatagattttttggagttgttttgaattttaaagtaattttgcggttttcggtatttttaattttatttttgattatagaaagaaagagggggacgggagggaaaggggttatgaagttaaatatattttttttattattaatattagttttagataaaataggttaagttttgaatttttgagtttggttatgattgttatttataattagattttaggttatttaataggaaatttgattgggtgcggtggtttatttttgtaatttttgtattttgggagttcgaggcgggtggattatttgaggttaggagttcgagattagtttggttattatggtgaaattttgtttttgttaaaaatataaaatagtcgggtgtggtggcgtacgtttgtagttttagttatttaggaggttgaggtaggagaattgtttgaattcgggaggtagaggtttttgtgagtcgagatcgtgttatcgtattttagtttgggtaatagagtaagattttgtttttaaaagaaaagaaaagaaaatttagaatgatttgatttattttttttttaggtttaaagtatttcggttaatatttaaaagatgtgttaagattttatatttaggatttattttaaatatatttattttgtttttgttaattaaaaaaaaaaaaaagaagaagggtttttgagtgagtttattttttttagatagtttaattttttttttttggtattattatgattagagttggagatttattaaatttattttttggaaaggataaattaagtttattttttggaaaggataaattattatttaataaataattttgtttaattatttatttaataaaattattgattgggttggaggttggtgtttattgtaatgaagagggtaggtttgtttcgatttttagagagattttagttttataggaagattaataagttaatcgagtttatagggtagtagtaagtggtttgaaagaggtaagaaaggggtgttaggtaatatagaagaaggtttggaaataggttttagaggaggtgattgtaatatagagatggggtttagattttttgttttttggataatggaatgataaagattgagtaaggttagagtattatttaggtaaattaagtgtttaattagaagttatagtataggttaatataattttagatttttttttttgttttattaatattcgaatttgtgattattttaatatatttttatattttaatttgtttatggtatttattttaggattgtaaaattatattttaaaaagtggagtttatataaggtagtttaaaaatgaagataaattagaataaatatgtgaaattatttttgttatttgtagatttgtaggttagggtgattttgagataggtgtttgtgtgttttcgtgagtacggcgttgttttttaatagggtagggattttatgttttggataagtttgagtatataaaattaaaatgtgtgtagtttatgattatttatgtgttgagttttttttatttggggatttaaaagtgaaaaggagggtagaattttatatttgaattttaatttaaattgaaaaaaaatttattttttttttatagtgtttttttattcgatagattttttttattttgtattttttttgtggtatttgaaggagatttgattttatatttttgaagttagtgtatattgtttagtttggtgttattgtaatattaagtgaaaggttgttgtttgtatcgtttacgtaaatgttgtcgtatatagtttatttttagtatgtagaagtagttgtttatttggggaagtttggtttagtggtgaagggttgtggttaaagtacgggattagaagttaggaagatgtatatatcgaaattaatttagatttgtttggtaatttttcgtttttgttttgtttatgtgttgatatttatttaggatttagtatagtgtttgaaatatagtaggtgtttaataaatatttttttttttttttttttttttttttttttttgagatagggttttattttgttatttaggttggagtgtagtggtgtgattatagtttattgtagttttgaatttttaggtttaatgtttttattttagttttttaagtagttaggattataggtatatattattatgtttagttaattttttattttttgtagagatggggtttcgttatgttgtttaggttagttttaagtttttggttttaagtgatttttttatttttgttttttaaagtgtcgagattataggcgtgagttattaggtttggtaataaatattttttgaatggatgaatgaatgtatgtttttatttagttaaggtgaatgtagacggttgtgttttttgggtatttagaaagtaaatagataatgttttttaaatttttggaaaggttgaataggtttttttattttgggatatgaataggtaaaaattgggaaagataaaattataagatgtttgggttatttttagttggtatagtttttgtgtataaagaatattttagtggtttatgatgaaagattaaatttatttttgtttttgagttttatgagaaagatagttagtgtttatatataaatattatattgtttgtaatgataatgattatgttattattattttttaatttatttattttaaatgtttggatttaataagagaaagaggtattttataatttttgtgggatttatatatacgtgagtttagtgaagggttttaggaggtcgaggttatttattcgatggtttagatcgtgagtaaaaagattgtttttatttagaatattggaggtataagattattatgttattttttttttatatatatatatatgttattattgtaattaattagtattagagatttagtttttttgagaaaaattgttttttttttttgaataatttttggttttttgataggagaggatg

SEQ ID NO: 21 - DNA, 4501 bp, Artificial Sequence
  chemically treated genomic DNA (Homo sapiens)
ttagggagtaaataaattatgtgtggggttgggtaattagttgagtcgaagcgtaaataaaatgtgaatatacgtttgcgggttatatatagtgtatttttattagtatttagaaaaaattgtgagttagtgaattaggaaattaatgtttggaaggtagttaaattttaattagtttaagatttttttttttttttaaaaaaaggtacggaagtaatatttttttttttttttttgattagaatcgatgtattttttgtgtatgatcgtatttttaataataaaaggggaaagaggatttggaaaggaattaaacgttcggtttgttcggggaggaaagagttaacggttttttttataagggtttttgttgattttttcggttcggtttataagttttttatttgttttttttaggaagttcggtttcgcggttcgggtattttttgttttttttatattttttcgtttagtatttttgattttttttaaattcggtagttcgagattgttgtaaatcggcgttatagggcgtaaaggggatttgttttttttgaaatttggttgagaaattgggaatttcgtgtgggaggcgtgggggtgggacggtggggtatagattggtagagagtaggtaatttttttttcgttttagtttagttttggaataggtagatatattttagggttaaatagacgtttttcgtacggggttttacggaagtttgagtaggcggggtaggaggggcggtatttgttgttttggtagtaaattgggggatttagtttgggtggaaggtatttaatttagatagttgtgtatatataatgtataatatatgattttttttaataaatgtaatgggagtttatttataacgcgttttttaagtatacgtggtaatgcgttgttgggttattttaattattttaggtatcgtttttttttttatgtttttattatttttttttatttatattaatattttacgttttgaacgcgcgtttattaatattttttttttttttattttttttgggatttttgattaaagcgcggttttttttttagttttagcgaggcgttttgtagtttggtacgcgcgtggcgtggcggtgggcgcgtagtgcgttttttgtgtggagggtagttgtttcgtttgcgatgatttatatttataggataaggatgcggtttgttaaatagtattgttacggaggagtagtagagaaagggagagggtttgagagggagtaaaagaaaatggtaggcgcgcgtagttaatttatgcggtttttttattttgtttatattttagagttagagtgttcggttgttcggttgagttttttttttattttttttattttttttattttttttataagcgtttttttcgggtttttaaagtagagggcgtgggggaaaagaaaaaagattttttttcgttaattttcgtttatcggttttttataatgcgagggtttggacggttgaggattttcgagttgtgttgttcgcggtcgttatcgtcgggtttcggtcgtttttggttttttttttgtttcgagaagggtagggttttttagaggtttggcgggaaaaagaacggagggagggatcgcgttgagtataaaagtcggttttcggggttttatttaattcgttgtagtaattttagcgagaggtagagggagcgagcgggcggtcggttagggtggaagagtcgggcgagtagagttgcgttgcgggcgttttgggaagggagattcggagcgaatagggggtttcgtttttggtttagttttttcgttgattttttagttagcggttcgtaatttttgtcgtatttacgaaattttgtttatagtagcgggcgggtattttgtattggaatttataatattcgagtaaggacgcgattttttcgacgcggggaggttattttgtttatttggggatattttttcgtcgttgttaggattcgtttttttgaaaggttttttttgtagttgtttagacgttggatttttttcgggtagtggaaaattaggtaagtatcgaagtttatttgttttttaatttatttttttattattttaatgttgagatgagtcgaatgtttaaatagggtgtttttttttttatttttgcgttattgatattttttttagagtagttatggtaattggggttggggtggggggtaatttagaattggatcggggtaaagtgatttgttaagatgggagaggagaaggtagagggaaaacgggaatggtttttaagattattttttcgagatttttgttttatgaatatatttacgttgattttcggtcggtcggatatttttgttttattgtgttaattgttttttgggttttggggggttgggggttgttttgcggtgggtagaaagttttttgtattttgagttttttggagtagggatcgtatatcgtttgtgtgagttagatcgtttcgtagtcgttgatttgttttcgttttcgggagggtatttaaatttcggtttatcgtatttttgatagtcggagacggatattgcggcgcgtttcgttcgtttgttttcgcggcgattttaattcgttttgatttttttaagaagttggtatttggttttttaaaaagtaataatataatttaaaatttgggtttttagaggtgttaggacgtggtgttgggtaggcgtaggtaggggaaaagggaggcgaggatgtgttcgatttttttggaatcgttgatttggaaaaattagggcgaattttcgtatttagttttgatttttttgtcgcggtcgttttcgggtgttttcgcgttcgagatgcggaggaattgcgaggagcggggttttgggcggttttagaatagttgttatttttggtggggtggtttcgggggaggtatcgtagcggggtttttggcgtagttgtattttcgtattgagtgcgaagggaggtgtttttattattatttgatattttttttgtatttatggaggggtgttaaagttcgcggttgagttcgttattttagtcggcgagagaaagaagaaaagttggtaaaaggagtgttggacgggggcggtattgggggtggggacgggggcggtggagagggaaggttgggaggggttgcggtgtcggcgggggtaggagagcggttagggcgcgagtgggaatagtcgtagcggaggggtttcggcgcggagcggggtttacgtagtcgttagcgtttaggcgtttttcgtttttttttttaggtggcgtaaaattttgtgttttggattttggtaaattgttttttttatcgttatttttcgcggttttttaagggcgttagggtcgatttcgatttttttgtcgttgcggggtcgattttcgggttttgcgtttcgggttttcgggggagcgggggttcggcgggtattaagtcgttggtttattaagtgcgttttcgagatagtaggggattgtttaaagggggtgaaagggtgttttttttatttttttattaagattatttagtcgttttaggggatagttttgtaaggggagaggttcgggattgtggcgcgtattgcgcgttgcgttaggttttcgtattaagatttttttaatttaagattgtttttcgttttgtgtgtttcgttttagtagtttttcgcgacgatgttttttaacgttagttttattaataggaattatgatttcgattacgattcggtgtagtcgtatttttattgcgacgaggaggagaatttttattagtagtagtagtagagcgagttgtagttttcggcgtttagcgaggatatttggaagaaattcgagttgttgtttatttcgtttttgttttttagtcgtcgtttcgggttttgttcgtttttttacgttgcggttatattttttttttttcggggagataacgacggcggtggcgggagtttttttacggtcgattagttggagatggtgatcgagttgttgggaggagatatggtgaattagagttttatttgcgattcggacgacgagatttttattaaaaatattattatttaggattgtatgtggagcggtttttcggtcgtcgttaagttcgttttagagaagttggttttttattaggttgcgcgtaaagatagcggtagttcgaatttcgttcgcggttatagcgtttgttttatttttagtttgtatttgtaggatttgagcgtcgtcgttttagagtgtatcgatttttcggtggtttttttttatttttttaacgatagtagttcgtttaagttttgcgtttcgtaagattttagcgtttttttttcgttttcggattttttgtttttttcgacggagtttttttcgtagggtagtttcgagtttttggtgttttatgaggagatatcgtttattattagtagcgattttggtaagcgaagttcgtttaggtttgttaaaagtgggcggttggatatttttt

SEQ ID NO: 22 - DNA, 4501 bp, Artificial Sequence
  chemically treated genomic DNA (Homo sapiens)
gaaaggtatttagtcgtttatttttgataggtttgggcgggtttcgtttattagagtcgttgttggtggtgggcggtgtttttttatggagtattaggggttcggggttgttttgcggggaggatttcgtcgaggagagtagagaattcgaggacggagagaaggcgttggagttttgcgaggcgtaggatttgggcgagttgttgtcgttgagagggtaggggaagattatcgaggggtcgatgtattttgaggcggcggcgtttagattttgtaggtataagttggaggtggagtagacgttgtggtcgcgggcggggttcgggttgtcgttgtttttgcgcgtagtttggtaggaggttagtttttttgagacgagtttggcggcggtcgagaagtcgttttatatatagttttggatgatgatgtttttgatgaaggtttcgtcgttcgggtcgtagatgaaattttggtttattatgtttttttttagtagttcggttattatttttagttggtcggtcgtggagaagttttcgttatcgtcgtcgttgttttttcgaagggagaagggtgtgatcgtaacgtaggagggcgagtagagttcggagcggcggttaggggataggggcggggtgggtagtagttcgaattttttttagatattttcgttgggcgtcgggggttgtagttcgttttgttgttgttgttggtagaagttttttttttcgtcgtagtagaaatacggttgtatcgagtcgtagtcgaggttatagtttttgttggtgaagttaacgttgaggggtatcgtcgcgggaggttgttggagcggggtatataaagcgggaggtagttttgagttaaaggggttttggtgcggaaatttggcgtagcgcgtagtgcgcgttatagtttcgaatttttttttttgtagagttattttttaaagcggttgggtggttttggtgggggaataaagggagtatttttttattttttttggatagttttttgttatttcggagacgtatttagtgaattagcggtttggtgttcgtcgagttttcgttttttcgggagttcggagcgtaaagttcgggagtcggtttcgtagcggtagaggaatcgaaatcggttttggcgtttttaagaagtcgcgggaggtggcggtgaggaaaataatttgttaaaatttaaggtataaagttttgcgttatttgaaggagaaggcgagaggcgtttgggcgttagcggttgcgtgaatttcgtttcgcgtcggggttttttcgttgcggttgtttttattcgcgttttagtcgtttttttattttcgtcggtatcgtagttttttttaattttttttttttatcgttttcgtttttatttttagtatcgttttcgtttaatattttttttgttagttttttttttttttttcgtcggttggagtggcgagtttagtcgcgggttttaatatttttttataaatataaggggggtgttaaataataataggggtattttttttcgtatttaatacggagatgtaattgcgttagagatttcgttgcgatatttttttcggagttattttattaagggtagtagttgttttggaatcgtttagagtttcgtttttcgtagttttttcgtatttcgggcgcgaggatattcgagggcggtcgcggtaggggagttagggttgggtgcggagattcgttttggtttttttaagttaacgattttaggagaatcggatatattttcgtttttttttttttttgtttgcgtttatttaatattacgttttaatatttttagagatttaggttttaaattgtattattgttttttaaaaagttaaatgttaattttttaaaaggattagggcgggttggaatcgtcgcggggataggcgggcgggacgcgtcgtagtgttcgttttcggttgttagaaatgcggtgagtcgaaatttaaatgttttttcggagacggggataagttagcggttgcggagcgatttggtttatataggcgatatgcggtttttattttaaggagtttaggatgtaaggggttttttgtttatcgtaaagtaatttttagttttttaaaatttagagagtaattaatataataaagtaggaatgttcgatcggtcgggagttagcgtgaatatatttataaggtagaaatttcgaaagggtagttttaaaaattattttcgttttttttttgttttttttttttttattttgataagttattttatttcgatttagttttggattattttttattttagttttagttattataattattttgagaaaagtgttaatagcgtaggaatgggagaaaagatattttatttaggtattcgatttattttagtattaaagtgataaaaaaataaattaaaaggtaagtggatttcggtgtttatttggttttttattattcgaaaaaaatttagcgtttaagtagttgtaaggagagttttttagagaagcgggttttggtagcggcggggaagtgtttttaaatgggtagaatagttttttcgcgtcgggagagtcgcgtttttgttcgggtgttgtaagttttagtgtaaagtgttcgttcgttgttatgggtaaagtttcgtggatgcggtaagggttgcggatcgttggttgggggattagcgggagggttgggttagaggcgaagttttttattcgtttcggatttttttttttaggacgttcgtagcgtagttttgttcgttcggtttttttattttagtcggtcgttcgttcgttttttttgtttttcgttggaattattatagcgagttagataaagtttcgaaaatcggtttttatatttagcgcgattttttttttcgttttttttttcgttaagtttttgagaagttttgtttttttcgaggtaggaggggagttagggacggtcggggttcggcggtggcggtcgcgagtagtatagttcgggggtttttagtcgtttagattttcgtattataaagggtcggtgggcggagattagcgagagaggattttttttttttttttttacgttttttgttttgggaattcgggaggggcgtttatggggagggtggggagggtggggaaggtggggaggagatttagtcgggtagtcgagtattttagttttaggatgtaaatagagtaagagagtcgtatgaattaattacgcgcgtttattatttttttttgtttttttttaaattttttttttttttttgttgttttttcgtagtagtattgtttgataaatcgtatttttgttttgtgagtataaattatcgtaggcggaatagttgttttttatatagagaacgtattgcgcgtttatcgttacgttacgcgcgtattaggttgtagggcgtttcgttaaggttggggaaagggtcgcgttttgattaagagttttagggagagtggaggaaagaagggtattaatgggcgcgcgtttagagcgtgggatgttagtgtagatagggaggaatgatagaggtataaggaggaaaacgatgtttagaatgattaaaataatttagtaacgtattgttacgtatatttggagagcgcgttatgaataaatttttattgtatttgttggggggagttatgtattatgtattatgtatgtatagttatttggattggatattttttatttagattgagttttttaatttgttgttaaagtagtagatatcgttttttttgtttcgtttgtttaggttttcgtggggtttcgtgcgggaggcgtttgtttagttttgagatgtgtttgtttgttttagagttgggttagggcgagagggaggttgtttgttttttgttagtttgtattttatcgttttatttttacgttttttatacggagtttttaattttttagttaggttttagaagagataaattttttttgcgttttgtggcgtcggtttgtaatagtttcgggttgtcgggtttgggagaaattaaaggtgttagacgggagaatatgggaggggtagggggtattcgaatcgcgggatcggattttttaaaaggggtaagtggagagtttgtggatcgagtcgggggagttagtagagatttttgtgaaaaaaatcgttaattttttttttttcggataaatcggacgtttaatttttttttaggttttttttttttttttattattggaaatgcggttatgtataaaaaatgtatcgattttgattaaagaagaggagaggagtattattttcgtgtttttttttgggggggggggggagttttgagttaattaaaatttggttgttttttaggtattaattttttagtttattgatttataattttttttgaatattagtgaaagtgtattgtatgtaattcgtaaacgtgtatttatattttatttacgtttcgatttagttagttgtttagttttatatatgatttgtttgttttttga

SEQ ID NO: 23 - DNA, 1451 bp, Artificial Sequence
  chemically treated genomic DNA (Homo sapiens)
tagaaatagggttttattaggtttcgaatttttgggtttaagtaatttgtttgtttcggttttttaaagtgttgggattataggtgtgagttatagtgtttggttaaatattttattttttagattataagatgtttaattttatttttggtaaaaagttgatttagtaaattagggttttaagtgaagtcggttggggtttgaatttttgatatttgtttagggtggaagatatagtagttgtatttatgggttatttggggtgtagggtgattagttggaggttgtgagtttttttgttttttgaaatgtttgtacggggtatttaggaagggttggggattgggtgaggaggtgtggatagaatgttttttggaaattgttttaggggtagtttgagtggtttgagttgtgtttgttttattgaaggttggagttttagagaaaagtttttatggacggatttattttttagaattgttgtttttgcgggagaatatttttttttaggtgttgtttttagggtagtagggaagattgggaaaaattgaggggtaagagttgttggaggggggagttatatttattgagtgtttattatatgtcgggtgttgttgaaggtttgcgggttttataggatttttttttagatttttatatttttgtagattatacgtcgtttatagatgattttgaatttagaagggttgtttaggtttagggtttagttagtgagtggatgggtagaattagatttgttttggaagggtttgttttattttggcgtttaaaatgtgttttttattttttgttattaggataagtaaattcgagtattttttcgttaggggtttaagtttattatgggtttgatttttaaggttatattttcgtttttttatttgatagataggaaatttttgaaatgtttttcgtacgtgtaagacgttttcgcggtggcgggcgatagagggcgtatagtgggatcgtagtacgagttcggagtatttttagagtcggcgatttttgttttcgtttttgtcggtcggttttttcggggtttaggagggtagtatcgtcgggtttcgcgttatgatattagttttggagtggtgtagtgtgtaaagtttattggttggcgtggttcgggatacgttttcgcggagcggaataaaacggcgcgtaggtcgggcgtatttagtcgttattttcgagagcgtttgtcgtttttgcgtcgtcgagttagttgttaggtgagtgcgttttgagtcgcgcggttttgttcggcgcggaggggcgtttgggtacgtatttagcgtttttcggttttgttagtttcgtcgtagtttcggggttgtcgtaggcggggaattgtgagaagtgatcgtagttagttcgggtagtgttgtttttttttggaggtattaggttcgtttttatttcgggttttt

SEQ ID NO: 24 - DNA, 1451 bp, Artificial Sequence
  chemically treated genomic DNA (Homo sapiens)
gaaggttcgggatggggacggatttagtgtttttagaaaagagtagtattgttcgggttaattgcggttattttttatagtttttcgtttgcgatagtttcggggttgcggcggggttggtaagatcgggaggcgttgagtgcgtgtttaggcgttttttcgcgtcgggtagagtcgcgcgatttagggcgtatttatttggtagttggttcggcggcgtaggggcggtaggcgttttcggaagtggcggttgggtgcgttcggtttgcgcgtcgttttgtttcgtttcgcggaagcgtgtttcgggttacgttaattagtgggttttgtatattgtattattttagggttgatgttatggcgcgaagttcggcggtgttgtttttttaggtttcgggaaggtcggtcggtaggggcgggggtaggagtcgtcgattttgggggtgtttcgagttcgtgttgcggttttattgtgcgttttttgtcgttcgttatcgcgaaaacgttttgtacgtgcgaggggtattttaggagttttttgtttgttaggtgagaaggcggagatatgattttagaggttagatttatgataaatttgagtttttaacgaaagggtgttcgaatttatttgttttggtggtagagggtgagggatatattttgggcgttagggtaagatagatttttttagggtaggtttgattttgtttatttatttattagttgggttttgggtttagatagtttttttgggtttagggttatttgtgaacggcgtgtaatttatagggatgtgagggtttaaaaggagattttgtaggattcgtagatttttagtagtattcggtatgtaatagatatttaataaatgtaatttttttttttaatagtttttgttttttagttttttttagttttttttgttattttaaggataatatttggaaaaaggtgttttttcgtaaaagtagtagttttgaaaagtgggttcgtttatagaggtttttttttggggttttaatttttagtaggatagatatagtttaggttatttaagttgtttttggggtagtttttaggggatattttgtttatatttttttatttagtttttagttttttttgagtgtttcgtgtaggtattttagggagtagagaagtttatagtttttagttggttattttatattttaggtggtttatagatgtagttgttatgttttttattttgggtaggtgttaagggtttaggttttaatcggttttatttaaagttttggtttgttgaattaattttttgttaggaataaagttaagtattttatgatttagaaaatgaagtatttggttaggtattgtggtttatatttgtaattttaatattttgggaggtcgaggtaggtagattgtttaaatttaggagttcgagatttggtgaaattttgttttta

SEQ ID NO: 25 - DNA, 771 bp, Artificial Sequence
  chemically treated genomic DNA (Homo sapiens)
tgtcggtaaatttgttgatttaggttttacgagggagtaagtaatattggatttttttcggtatttcgagaatggggtgggggcgtttttaaaggatttttttttttttttagtgtttgtttttgttttcggttcgttttttgttaagatttggggatttttagggtttggagggaaagttttttgggacgattatagagcgttagtattgaattagtttggagagcgcggaaggaaagggtcggttcgtagagggcgcggggaaggtagggtggggacgcggtggagttcgcgttcgtttgttgaaggtttggaagtgtagcgtagaagatagagggtgattaggaagacgcgcgaacggggttggtcggtcggcgggtgggggaggggaggcgggggaaggcggttgagtgggtttttggagtgtgtgtgtttgtgttagtgtgtgtgtgtgtgtgtgtatgtgtgtgtttggcgtttggttagggtgattttttataaattatatgttttttagtttttttttaaaaggttgtgtcgagggttggttagtgaggttcggttcggggaaagtgaaagtttgtttgggttttttcggcgttagagtcgtttttcgtattttaggatagcggtgcggttttcggtcggggcgtttatttcgtagtagttagcgagcgagcgagcgagcgagggcggtcgacgcgttcggtcgggatttagttgttcgtatgatcgcgtcgggcgtcgtcgggcgttgtttttttacggtaa

SEQ ID NO: 26 - DNA, 771 bp, Artificial Sequence
  chemically treated genomic DNA (Homo sapiens)
ttatcgtgggagggtagcgttcggcggcgttcggcgcggttatacgggtagttgggtttcggtcgggcgcgtcggtcgttttcgttcgttcgttcgttcgttggttgttgcggagtgggcgtttcggtcgagggtcgtatcgttgttttgggatgcggagagcggttttggcgtcgagaggatttaggtaaatttttatttttttcgggtcgagttttattggttagttttcggtatagttttttaagagaggattggggggtatgtggtttatgggaaattattttggttaggcgttagatatatatatatatatatatatatatatattgatatagatatatatattttagaggtttatttagtcgttttttttcgtttttttttttttattcgtcggtcggttagtttcgttcgcgcgtttttttagttattttttgttttttgcgttgtatttttaagtttttagtaaacgagcgcgggttttatcgcgtttttattttgtttttttcgcgttttttgcggatcgatttttttttttcgcgttttttaggttgatttagtgttagcgttttatgatcgttttaagggattttttttttaggttttgaaaatttttaaattttagtagaaaacggatcgagagtagggataagtattgggaagggagggaaattttttgaagacgtttttattttattttcggagtgtcgaaaggagtttagtgttatttgttttttcgtggagtttgagttagtaggtttgtcggta

SEQ ID NO: 27 - DNA, 5942 bp, Artificial Sequence
  chemically treated genomic DNA (Homo sapiens)
taaggattaggattttaatataaatttagttttttattttttcgggttttttatgtttttttaaattcggtcgttttttatagttttttgtttttgggtttttttttatattttttattatttttttatttcgtatttaagattttatgaaaggtttttttagaaaagaaaaaatgaggagttttgcgatttgaatagtttttttttgttcgtttgtaaatttgaatttttggattttataatagtgagttttttttgtgtttattattcggtatgagtaagataagggggtgggtggtgggagagtggggaagtgtgggaaagaaaagtgtagataaatgggtggaataaagaagtttgatttaaagtttagatttgggggttagagttttggttttagtttaattaagtgtataagtttgataatcgtgggtttttttattatattggttttttttagtaaaattttatttatttttatttttagaggttttgattttttttattattttgtattataatatttgataatatgggtcgggagtggtggtttatgtttgtaattttagtattttgggaagtcgaggtcggcggattatttgaggtcgggagtttaagattagtttggttaatatggagaaatttcgtttttattaaaaatataaaattagttgggcgtggtggggtatgtttgtaattttagttattggggaggttgaggtaggagaattttttgaattcggggggtagaggttgtggtgagtcgagattatgttattgtattttagtttgggtaatgagagcgaaattgtattttaaaaaaaaaagaaaaaaattgataatatggtattttttttttttagttgtgaattttttgagggttgggaatgtttttatttgtatttttggtatatagtatatggatttatgtttgtgaaattagtgaattggttgtagttagggaattttttttgggggaagtgagatttgtacgaagttgggtaatttttggtttaggggggttgaaagaataggtgggggatttttaggagggtttgggatttgaaagtgaatttagattggtagggaggtgattttattatgttatttggagaggttgttttttttgatttaggtgggatttgtatgtggtttttaggtttttgtttggtttttttaaaatagtttttagaaaagtgaataaattataaatggttgatttatttttgatttttagttcgttttttacgaagatagagtttattgattaaaaattttaggatttgtatttgggtagattttaggaaggggaagttaaagggtttaggttagaggtttaagtttagattttagtagtagattagggttagattttattaaagttagaattcgaggtttatgtaagtttttagatttcgtttttaagttttgtttttttttttttttttttttttttttttttagtttagtgtggttattcgagggggttttttttttttagttatagttcgggtattttaagttgggaaatgtgttattcggggttggggtgttgatttgtagtttagttttttttggttttttttgaggatagtggggatgggattggtacggtttttatttcggggttttagttttatttttggtttttagtttttttttagtagtagtttgaagttcgggttggagatgggtattttaagtggaaggttgggaggttgaggattttgcgatagtgatagtaggtgagtagtggatgtgcggtggttggaattttggaagtgggtgttatagttttcgtagtattggagggagggagtaggagatttgtagagaaagaagaaaaagtattaagggtaggggaaggaaaaggggaagagttgaggttttagagggggttggtagggtagaataggatttttttagtttttttgttaaggaataaattgttagttaggtatagtggtttacgtttgtaattttaatattttgggaggtagaggcgggtagatggttttgagtttaggagtttgagattagtttgggtaaaatggtaacgtttgtttttttttttttttttttttgagatggagttttgttttgttgtttaggttggagtgtagtgttatgattttggtttattgtaatttttattttagcgatttttttgtattagttttttaagtagtcgggattataggtatatgttattatgtttcggtaaagtttgttttttataaaaaatatgtttgagtttaggaagcggaggttgtagtgagttgaaattatattattgtatattagtttgggcgatagagtgagatgagtgagattttgttttaaaaaaaaaaaaaaaaaaaaaaaaagggataaattgtttttttttttatttaatagtgagggatttaggttggtttaaaggtggtggtgagttatttgaattaattgtttatttagttatagattaaattttttattttatttttttttttttttttattattgtatttgatttgttttaaaaataaatttttttaaattattgtgggatttagagtagaatagttgaaagaaaaaaatggtaattagatttagtaaatttttgggtaaggggagggatattagttataatgattatagttaatatttatgtattgtatattatgcggtatgtattattttagtattttatatatattaatttattgaattttaataacgatttttattatttttatttttaagatgagaaaattggaatatgtagatattaggttgtttgtttaagtaagtggaattaggttttaaatttagggagtttatgtttataattatttgattatattattttgttaatttatatatgaggataaggaaagaattttttagtattgtgttggggcgtttggtgtggtgtggttgggagaggtagaatataatgagatatgggtttgagttaaagtttttttttatcggtttttcgggttttttgtttttttatggttttttttgattatgcgggttattttagggaagttagtttttttagcgagttgagtcgtatttttgttatttagtttatagatttttatttaggtagttttacggtttaggagatagtttatagttgttttttggttcgttcgagtagtatatattagtggggtttattagaaggtatttcgggcgttgatattttttttagttttttttgttttatgcggttttagtagttttttaagttttggtaggttttttttttgggttgtttttagtattcggtgagttattttatttttagttttaagggattttttttgtttatgtttttttgatgttttttttgttattgtttttgttgttggtgtttttattattttttttttttttttttttttttttttggtaggtttagtttgagatttttgggagttaggagcgttgtttttatttttaattagggttttatagaaagttcgggttgtagttttatttagggtggattttggtttttcgggttgtggttgttgttgtttatttttttagaggtcgttggggttagtggttggggtgaaggtgatgagtaagggtcgggatatggtttttgggagaattgagaaaatgatattaggtaagggaaggatgagataagtaagttaagttcgtggtgattttgtagtaattatagttttagagatttgttgggatgagaaaaagtagttaaaaatatttttttgttattaaagtaattttataatttaggattttgtagggtttaagggagagagattttgcgtaaaaatatggaattttataatatcgattttgttttttagtaaagattaataaaattttatgagattgttgtttagaggttttgcgttcggtttttatttttatttttattaataataaatattagtttttttttgaaattatttttttatttcgtaagatatattagtaggaaaaaaaaattagtttggttttttaagtttttcgcgattttatttcggagttttttttttttaaataaaaatagatgggttattttttagaagatttcggggagagttttttatacgtgttgttgtgtagttttcgtatcgtaaaatggcgttattttaattagaagagttgatataattaaatagttatacggtacgaagacgtatgcgtggcgataataataataaaaattataatttatattatttgagggttcgggcgtgcgtaaagtttcgggtttagtttttcgcgttggaatttttttaatagtaaacgagtaaagtttcgcgcgtttaggtggcgcgagtattaggatttgtcggttggggttttatttttatataacgtttttataatgtttttcgttttttttaacgtggttttcgttttaagtttattttttggagttaggaatttattttgtgggttaggaaaggtttttaggaggcggagggaaatttgtggaatgtcgagaagtcgtgtaatgaaataacgttacgtttgttttttattattattttgattagggttcgaaggttatatttagagtttaaggggaaatggagaagtgtaaagggacgagtagaatggttggtattattttaggttagcgtattgggacgttttagtttttatatcgtttattttattttatttaagtttttacgtacggagttaagtcgtatttttttttttatgaggtaggagttcggaggaaatagtatgttcgttaagggtttttggcgggattgattcgtattaggggtttaataggtaataaggatttagcggattggtcgaggataggttagttttttgggtagtagcgtcgcgtcgggattagaggggaacgtgaggagagttgcggaaagagatttagtttggttttttttttttttcgttttaagttagtttttttatttagtgagtataaaattgtattgtttagattttcgggtttcgaacgttatatttggttttcgttttcggtggtttttcgttgtgtttcgttcgtaagcgttttttttcgggttttcgtgatagttaggtcgtgcgcgggttattttgggattggtagttcgtttttttttatttagttagtttttttttttatcggggatttcgtgtttcggtatttatcgcggtatttgatttttggcgtttgcgtgttgtttttttttttattttttttaatttttattttttttattttatttcgtttgtcgcggtcgggttcgcggtttgcgttgtagcggtcgtcgtcgttttttggaagtagtaatttttttattttattttagttttggttttcgtttagtcggtgagtttgaagtcgtcgttgtttcgagttttttgtcgttgggagcggtatatggggttttcggattttgatgtgggggcgggggaggaagcgattaggttcggtacgaaggagggagaggtggtttgaggagcggaggggggatgtgtggatttcggtgaaagggatttgataatcgtttttaattcgtgagaaaaggaggagttcggtttttgtttgagaatgataaatttggaaatttttgggaaaggcgtgggggttatgtagagatttgtattggtagggagtttgagtcgaggtttttgtcggagttgatatagaggagagagggttttggttttcgggagttttagggatgtgggtcgggttggtgggttaaagtatttgttggttttttttaagtggtgggattttaaagaatgtttaattttaaagaaaaggggttgagatgtaaattagaggagttggagaggagtgttttagagtttgggttgttttaagaaagggtggtttcgaattttttcgtggttggagggtcgaatgtgggaggagggaggatattagaggtagggaaggagaatttgagttttattgatattgttttttttttagt

SEQ ID NO: 28 - DNA, 5942 bp, Artificial Sequence
  chemically treated genomic DNA (Homo sapiens)
gttagaaaaagaatagtgttagtaaagtttaagttttttttttttgtttttggtattttttttttttttatattcggttttttaattacgggagaattcggaattatttttttttaaagtaatttaaattttgaagtatttttttttagtttttttaatttatattttagttttttttttttgaagttaaatattttttggggttttattatttgaaagaagttaatagatattttgatttattagttcgatttatatttttggagttttcgaaggttagggtttttttttttttgtgttaatttcggtagggatttcgatttaggttttttattaatataagtttttgtatgatttttacgttttttttaagggtttttaagtttattatttttaagtaagaatcgggttttttttttttttacgggttgggggcgattgttaggttttttttatcggaatttatatatttttttttcgttttttaggttatttttttttttttcgtgtcggatttggtcgttttttttttcgtttttatattaaagttcggagattttatgtgtcgtttttagcgataagggattcggagtagcgacgattttagatttatcggttggacggggattaggattggggtggggtagggaagttgttatttttagggaacggcggcgatcgttatagcgtaggtcgcggattcgatcgcggtaggcgaagtggggtggggggagtggaaattagggagggtggggaagagggtaatacgtaagcgttaagggttaggtgtcgcggtggatgtcgggatacggagttttcggtagagaaagaaattggttaaatgagagaaagcgaattattaattttaggatgattcgcgtacgatttggttgttacgaaggttcggaggagggcgtttgcgggcggggtataacgagaagttatcggaagcggaagttaggtatggcgttcggggttcgggagtttgggtaatatagttttgtgtttattgggtgaagaggttgatttagggcggggaaaggaggaagttaggttggattttttttcgtagttttttttacgtttttttttagtttcggcgcggcgttgttgtttaggggattggtttattttcggttaattcgttgggtttttattgtttgttgggtttttagtgcgaattagtttcgttagagatttttgacgggtatattgtttttttcgggtttttgttttatgaggggagaggtgcggtttggtttcgtgcgtagggatttgggtggggtggggtgggcggtgtgagaattggaacgttttagtgcgttaatttgaggtggtgttagttattttgttcgtttttttgtatttttttatttttttttaggttttaagtgtgattttcgaattttggttagagtaatggtgaggggtaggcgtgacgttattttattatacggtttttcggtattttataggttttttttcgttttttgagggttttttttaatttatagagtggatttttggttttagaaaatgggtttggagcgggggttacgttgaggaaggcgaagggtattgtgggggcgttatgtaaaagtaggattttaatcgatagattttagtgttcgcgttatttgggcgcgcggagttttgttcgtttattattgaaaaagttttagcgcgggaaattgaattcggagttttgcgtacgttcgagtttttaagtaatgtgggttgtggtttttgttgttgttgtcgttacgtatgcgttttcgtgtcgtgtggttatttgattgtgttaatttttttgattagaatggcgttattttgcggtacggaagttatatagtaatacgtataggagatttttttcgagattttttagggagtgatttatttatttttgtttgggaagaggaaatttcgaaatgggatcgcggaagatttaaagggttaggttgattttttttttttattggtatgttttacggggtgggaaagtggttttagaaagaggttggtgtttattgttggtgaggatgggggtgggggtcggacgtaggatttttggataatagttttatggagttttattaatttttattaaggagtaaagtcggtattgtagggttttatgtttttacgtaaagttttttttttttaggttttgtagagttttaagttgtggggttattttagtggtaggaaagtgtttttgattatttttttttattttagtaggtttttgaggttgtggttgttatagggttattacgagtttggtttatttgttttattttttttttgtttggtattatttttttagtttttttaaaagttatgtttcggtttttgtttattatttttattttagttattgattttagcgatttttggaaggatgggtagtagtagttatagttcgagaagttagagtttattttggatggggttgtagttcgagttttttatgaggttttgattggggatgagagtagcgtttttgatttttagagattttagattgaatttgttagagaaagaaagagaaagaaaagaagaataatgaaggtattagtagtagaagtagtggtagaaggagtattaggaagatatggataagggagattttttgaggttgaggataagatgatttatcggatattgagggtagtttaggagggggatttgttagaatttaggagattgttggaatcgtatgaggtaggaggagttggggggaatattaacgttcgggatgttttttggtggattttattgatgtgtgttgttcgagcgggttagggggtagttgtgagttattttttgggtcgtggggttgtttgggtgggggtttgtgagttgagtggtagggatgcggtttagttcgttgaagaagttggtttttttgaggtagttcgtatggttagggagagttatggagagataaggagttcggaaaatcggtaaggggaaattttagtttagatttatgttttattgtgttttgttttttttagttatattatattagacgttttagtatagtgttgaagagttttttttttatttttatgtgtaggttgatagggtagtatagttaagtggttataaatatgagttttttggatttaaagtttgattttatttatttgggtaaataatttaatgtttatatgttttagtttttttattttagaaatgggggtagtaagaatcgttgttaggatttaatgggttaatatatgtaaaatgttagaatagtgtatgtcgtatagtatgtaatatatgaatgttagttatagttattatgattaatgtttttttttttgtttaagagtttgttaggtttggttattattttttttttttaattattttgttttggattttataatggtttaaagaaatttgtttttaagataagttaagtgtagtagtgagaaggaggggaaaagtggagtaaggagtttgatttgtaattgagtgaataattaatttagataatttattattatttttggattagtttggattttttattgttaagtaggaaggaaggtaatttgtttttttttttttttttttttttttttttgagataaagttttatttattttattttgtcgtttaggttggtgtgtaatggtgtgattttagtttattgtaattttcgttttttgggtttaagtatattttttgtagaaagtaggttttgtcgggatatggtggtatgtgtttgtaatttcggttatttgggaggttgatgtaggagaatcgttaaggtggaagttgtagtgagttaggattatggtattgtattttaatttgggtagtagagtaagattttattttaaaaaaaaaaaaaaaaaaaagtaggcgttgttattttgtttaggttggttttaaatttttgagtttaaagttatttgttcgtttttgttttttaaagtgttgggattataggcgtgagttattatgtttagttggtaatttgttttttagtagaaaagttgaaaagattttattttattttgttagttttttttgaggttttaattttttttttttttttttttttgtttttaatgtttttttttttttttttgtaggttttttattttttttttttagtattgcgagaattgtgatatttatttttaagattttaattatcgtatatttattgtttatttgttgttattgtcgtagggtttttagttttttaattttttatttggggtgtttatttttagttcgggttttaaattgttgttgagggggggttgggagttaggaatggggttgggatttcggggtgagggtcgtgttaattttatttttattgtttttaagagagattaggaaggattaggttatagattagtattttagtttcgagtgatatattttttagtttgggatattcgagttgtggttgggagggagagattttttcgggtggttatattgagttggagggaggagagaaggagggaggagaaagatagggtttgggagcgggatttaaggatttatatgaatttcgagttttgattttggtaaagtttgattttagtttgttgttgaagtttgaatttgggtttttgatttgggttttttgattttttttttttgggatttgtttagatgtagattttgaagtttttggttaataggttttgttttcgtgagagacgggttgagagttagaaataaattaattatttgtggtttatttatttttttggaagttattttgaggaagttaaatagaagtttgggagttatatgtaagttttatttgagttagaaggggtagtttttttaggtggtatgataaggttatttttttgttaatttgggtttatttttaggttttagatttttttgggagttttttatttatttttttaatttttttggattaagaattgtttagtttcgtgtaagttttattttttttaggaggagttttttgattatagttaatttattgattttataaatataagtttatatattatgtgttaagaatataggtaaagatatttttaatttttaaagagtttatagttggagagggaaagtgttatgttattaattttttttttttttttttgagatgtagtttcgtttttattgtttaggttggagtgtaatggtatgatttcggtttattataatttttgtttttcgagtttaagggatttttttgttttagtttttttagtagttgggattataggtatgttttattacgtttagttaattttgtatttttagtagagacggggtttttttatgttggttaagttggttttgaattttcgattttaggtgattcgtcggtttcggttttttaaagtgttggggttgtaggtatgaattattattttcggtttatgttattaaatattataatgtagggtgataagggaagttaaggtttttagagatgagaatgggtagggttttgttggaagaggttagtgtgataggagggtttacgattattaagtttgtatatttagttgaattgggattagaattttagtttttaaatttaaattttaagttaaatttttttgttttatttatttgtttatattttttttttttatatttttttatttttttattatttatttttttgttttgtttatgtcgggtggtaggtataagaagagtttattgttgtgaaatttaggaatttaaatttgtagacgggtaggggagggttgtttaagtcgtaagattttttatttttttttttttgggaaagttttttatgaagttttggatgcgaaatggaggagtggtgggggatgtggaaaagaatttaggggtagggggttgtagggggcgatcgagtttagggaagtatgagaaattcgggaaaatggggagttgggtttatattaaggttttggtttttg

SEQ ID NO: 29 - DNA, 2580 bp, Artificial Sequence
  chemically treated genomic DNA (Homo sapiens)
gaattcgagtttataagtttttttaaaaaaaattgatttaagtaaattttgggaagagtttttttgttatataatttaaggttttaaggttttcggatttatatattttataaatgaattagttagtttgtttaaatgtagggaaattgtgggaagaatgttttttttatttaatttaaggttttaaggtttttttaattaattttattagttaattagttaattatttaaaaataaaagtttgaaattgttaaaaaaaaaagataaggaaaaggaaagaaagaaagttattagtttgtttggtatataatatttaattgttgtttgatttacgtgtgggttttagatgtagatttttagtttttagttttttagagattgatattaggtttgttatacggtttaaaatgatgagtatatttatgaattttaattttatttttttttagatttttttggttaagaaattatgtagtttgtatgaagtaggtatttaaaatatatttgatgatttaatttttattggagaagaaatatttatatatgtttttttatttttatatgttttaaatatgtaaagattaaataaatatttttagaagtatttaaattttttaaagtaaatttattttaattagtaataggatttttttaatattggaaagttgagtgtgatcgtatttagtggtgataagtgtgagtttgtttggggagagggtaggatatttaggattttttaagtttagagttaatataataaagattattgagtgtttatttgggtgggttataattattgtttataggagtttatgaattataagtaaaagagtgaggagatatgattagtttataaataatttttaatatagagtagaaagtaatgaattattgtaatggagttattatagtgttaaggatgtttagagggtatttttgataggtagaggtgagggttagggaaggaagttgtagtttagttagttagagttgttggaatagatatgataatgttgttgttaaattgtttttttttttgaggatagaatgtttcgtgtaagtggtttggtggaagggattagtgttttaatatagggtgatttataagtaggaaagtgtgttttagaaatttagattagagtgatagattgaattggattatgggggatttatttgaatgttatttattgtattgtttttgcgattagtgttagtaaagtgttaaagggattgagtagatgagtgatattatgtaatataagttttgagttttatttgttagattgattggagaggggtttggttagttataggaaggtaatttggtatgtagttattatttttgagttgatgtaagtttttttgtatggagagttggttttttttattttgtgggaaaagagaataaaggagtatgggagtgtttaagggaaggagaaataaagggtagagaggtagcggtggtgttagggaagtttataggagttaatagtagggttgttttaatttagagaggaagcgatttggtgttttcggttttgtggttttttttatttaataatattttttattttataataatgttagggaaggcggaggttggtatagtgtattaagatatagttatttttgggtgatagaggtttagggtagtttattaagtaggtagaagtttttgatatatattttgagagataaagtaagattttgtattttaatttttagaattttttttattatttattatagtttcggagttatatagtttttattattttattataattttagaatattagagaatatattattttatttaattattttttattatatgtgaaaaaaatgaaggatatgggggaagtgtgatttgttttaaattatatattttatggtagagttaggttttttgtttgttatattagtgttttttttgttataattattttgaagaatttattttttagtaagaaaatatttttatggagagtagttggaaaatagttgagagatggaggggaggttgggggtgtggagaggggaaggggtaagtgtatagattcgttgaaggggggagaaaaggtcgtggggatgaagttagaaggtagaagggtttgttgggtttggtatgaaggagtatgagtttattgagttttttttggtttttttatgttagtaatgtacgtggtttagtttgttgtggtattggttagtagtcgaggtatcgttagttttgtgtgtgagtatgtatttttaggtaaagttattgaggttcgggtgatagtgtttcggtaggttgatagttaggtgattgaagtttgtgcggtaatttatatgatggggaatgagttgatttttttagatgattttatttgtacgggtatttttagtggaaattaagtgaattttattatttaaggattgagggttatggatacgggattttatatttgtaaggtggagtttatgtatttatcgttatattatttgggtataggtaacggagtttagatttatgtaattggtgagtaaagttattttattgagttgatatttgttgtattgtagttttttatgtat

SEQ ID NO: 30 - DNA, 2580 bp, Artificial Sequence
  chemically treated genomic DNA (Homo sapiens)
gtgtatagaagattgtaatgtaataggtgttaatttagtgaaatggttttgtttattaattatataaatttgggtttcgttgtttatgtttaggtagtatggcggtgggtatatgagttttattttgtagatgtagagtttcgtgtttatggtttttagtttttggatagtgaggtttatttgatttttattggaggtgttcgtgtagatggaattatttaggaaggttaatttattttttattatgtaggttgtcgtatagattttagttatttggttgttagtttgtcgaagtattgttattcggattttagtggttttgtttggagatgtatatttatatataaagttggcgatgtttcggttgttggttagtattatagtaggttgggttacgtgtattgttagtatggaaaagttaaagggaatttagtgaatttatgtttttttatgttaagtttagtaagtttttttgttttttagttttatttttacggtttttttttttttttttaacgaatttatatatttatttttttttttttttatatttttagttttttttttattttttaattgttttttagttattttttataaagatatttttttattgagaaatagattttttaagatggttgtggtaggaagaatattgatatgataaatagaagatttggttttattatgaaatatgtgatttggggtaagttatattttttttatgttttttattttttttatatatagtaagagataattagatgagatgatatgttttttggtattttaaggttatgatagaatgataggagttatatagtttcggaattataatgagtggtaggggaaattttgaaggttgaggtatagaattttgttttattttttaaagtatatgttaaaaatttttgtttatttagtgagttgttttgaatttttgttatttaggagtagttgtgttttgatgtattgtattagttttcgttttttttggtattgttgtagagtggaagatgttgttagatgaaggaagttatagagtcgagggtattaggtcgttttttttttaggttgaggtaattttgttgttaatttttgtgggtttttttgatattatcgttgtttttttgttttttattttttttttttttgaatatttttatgtttttttgttttttttttttataggataaaggagattagttttttatatagagaggtttgtattaatttaaaaatagtggttgtatgttaaattatttttttgtaattaattaggtttttttttagttagtttgataagtgaaatttaaaatttgtgttgtatgatgttatttatttgtttaatttttttgatattttattaatattgatcgtaaaaataatataataaataatatttaaatgagttttttatgatttaatttaatttattattttggtttgaatttttaggatatatttttttgtttataaattattttatattagagtattagttttttttattaagttatttgtacgggatattttgtttttagaagagaaaatagtttggtagtagtattgttatgtttattttagtagttttagttagttagattatagtttttttttttaatttttatttttgtttattagagatgttttttgagtatttttagtattgtgataattttattgtagtagtttattattttttgttttgtattaaagattatttgtgagttaattatatttttttatttttttatttgtggtttatgaatttttgtgagtagtgattatagtttatttaagtgagtatttaataatttttattgtattgattttaagtttaagaaattttaaatgttttgttttttttttaagtaagtttatatttattattattaaatgcggttatatttaattttttagtattgggagggttttgttattggttgagataaatttattttaggaaatttaaatatttttaagagtgtttatttaatttttatatatttaaaatatgtaaaaataagaaaatatatatgaatattttttttttagtaaaaattaaattattaaatatgttttgagtatttattttatataaattatatggttttttagttaagaaggtttagagagagataaggttgagatttatggatatatttattattttaagtcgtgtaataaatttggtgttagtttttgaagagttgaaaattgaggatttgtatttgaaatttatacgtaggttaggtaataattaagtattgtatgttaaatagattggtggttttttttttttttttttttttgttttttttttttggtaattttaaatttttatttttaaataattggttaattagttagtagaattgattaagagaattttaaaattttgaattaagtaaagaaggtattttttttataatttttttatatttaaataagttggttaatttatttataaagtatatgaattcgaggattttaaaattttgaattgtatagtaaaaaaattttttttaggatttgtttaagttaattttttttaaaggaatttgtgagttcgaattt

SEQ ID NO: 31 - DNA, 18997 bp, Artificial Sequence
  chemically treated genomic DNA (Homo sapiens)
atatttggtgatttttgtatttgatggattagttggtattatttagattgatgaattggtttatttgattttgtagcgttttttatttaggaatttagggtaagaagatagttttgattttttatgattttattttcgattattaggattcgtggtttattggtttttttaattaagttgtttttaaaaattttgattttcgaatgtttggggagattgatttgagtaataataaaatttcgtttttttgtatagttggttgtgtatgaattattttttttttattttaattgtttagttttgatgaattagttttgtttaggtagcgggtaaggtgaattttttgggaggttataaattttttttttatgattgtaagttattattgagtattttaaaagtaggtggagttgataaattgatagtttaggtttggtagttatagattatttttgttttaaatgggtattattgttatttgaataaattgtgaataaggtatatttttttgattgaatatagaaatgagtggaatagtttataagttgttttgtttaatgatagttattagttataagtggttatttagatttaaataaaagttaaataaaatttttttagttatattgtaattaagtatttttatttttttaagagatagtttaatgatttttaaaaaattttttttttttttttttttttttttattttttttttagttttttagaaatgtaattgtagttttttattttttttttattagatattttttatggggtaggtttatttaattatgtgtttagaagttttagagaggaatttttatttatcgggaggttgttttgagagataatagtttatttataatttaaagtatgtttgttataaagtttttttttatttggagagttttggttatttttataatttagttttgtttataaaaggtattagtagttattgtttagtagataaggtattgaaggtagtatgtagattttttaattattcgtttttttttttcgtgttatttatgttagtattttatgttttattttaaaagtattttttttttgttttaaaagtgaaatggtatttttaaggtagaaaattagtatttttttttttaaggtagttttggaataaaatattattttttttatattagattttatttttgttaagtggattttgtaagtagcgagagagtgaatttgtatttgggttataatattaattagtttaagtgtttaatagttatatatgtttagtagttattatattgggtagtgtagagatattgttatagaaaattttattgtatattgttgtttaggtattgatgattttagttttatgttgtggtgagtgatttgtttttggaaaggataatatagtggatttattttcgggtgttagtaagggggtaaaattgaggtttttttgagatttttaaatagttaggagggagggaaattagataaaggagttgaaaagttgttttattttattagaaattgaaaggatgaagggatatgggtttattgaagatatttattgttttattaggatttgattagaaatttgatattttaaaaatttgattttgtgttgtttgtaatttgattttttttaaatttttatttttgaaaataataatttattttatttgttttattaggaaataaggagagggggttttggttatattggggttaaagtttagaaggtagagattatatatgtaatagtagttaatagaagtaaagaggggaattttaaggtaaacgtgataatgtaagggaaaggaaatggaaaagatatttttttttatgcggagattttttttagaagagttattgtttatttaaattttggaggatttgtgttttttttggtaaataatgtgatttttttttgtagaggatgtatgatgtaaaattatggattttgtttttaagggaatttttttgtttttttatttttttattgttttatgtaatgaaatttttaaagtatattttgattttagttttagtttataaattagatttgttttttaagagttatttgagttgtagtttttttagtgttattttttgtatatttaaattattgggggcgttgtagtttggttaatttttaattatttagagaattaggagaagtagatatggttaattattaggattaatgatagttaataagagtaaatatttattgaatatttattgtttgttaaatattatgttaatagtttaatgtttaatattattttatttaatttttatataattttaatgagttaggtattgttatttttgttttatagaaaaggaaaatgagattgttagattgagtaatttgttttagattagataattagtaaatagtagaattaaggtttaaatttaggattgtttgattttagagtttgtatttttatttattattttggataagaattttaaattatattaatattttgatttaaattaattgaaattaatattagtgttagtaattttttattgatagattagttaaaaatgttttaatgattatagaattataaattgaatagagaagtaggtttttttttgttgttttaagtagtttagaaaagttttagtgtagtatattggtgtgattagtaggttttagaaataaatgtatttaataagtttatttggtgttttttattttttttttttttttgtgagagtttttggggagattttaatgatgatagttgatatggattaaaggtagataaaatataagggagaaaatattggaaggagtttggttgatggaatagaaattttttgaagaatttatatttgaatgattaaaaagtattagtttagtttgtaaagtttgaagttgaatattcgtgaggaagttatttttttatttgttgatgaggtagagagaaaggtttaatttgttagagaaattgatgttttttgttatattatattgaaataagaattagtttgttatttatttttttttttttttttttagtaatataggtttaggttgaatttatgtttatatagttgtataaatttttacgggtatgaatataaatttatttatttaaatagattttaaaggttttttaggttattttttttttttttagaatttaagtaaggttttgattattattgataatatattcgttagttaatgcgtgtagagtttttagtttaaaggtaaataaaaagtgaaaaggggtcggcgtagtggtttatttttataattttagtattttgggaggttgaagtaggtagattatttgaggttaggagtttaagattagtttggttaatatggcgaaatttcgtttttattaaaaatataaaaattagtcgggcgtggtggtaggtgtttttaattttagttattcgggaggttgaggtaggagaatggtttgaatttaggaggtggaggttgtagtgagtcgagatcgtattatttattgtattttagtttgggtgataagagtaaaattttattttaaaaaaaaaaaaaaaaaaagtgaaaaggtaggaacgttgttgtttatttgttgttttaggaattttgtttacgtatagtttaaaatattaagaagttgaaaataaagtatttggttatgtgtggaaaaatttatagttaaaaggtgagatgaattgggtttagaaggtcggatttacgtgaaattaaaagggtaacgaaagttagaatttaattttttaaaaaaagttaaaataggtcgggtgtagtggtttatgtttgtaattttagtattttgggaggtcgaggttggcggattataaggttaggagttcgggattagtttggttaataatggtgaaatttcgtttttattgaaaatataaaaattagtcgggcgtggtggcgcgtgtttgtagttttagttattagggaggcggaggttgtagtgggtcgagatcgcgatattgtattttagtttggtcgatagagtaaggtttcgttttaaaaaaaaaaaaaaaaaaatagttaaaatttttaaaataattttatttgttaaaatataaaatttgaaattattttagttttttttgtaaaatgagttggagagagtagggttgaattaggtatgttttttcgggtttttcgacgttgatatttcgggatattatattaggtttaagatattagtttgcggaaagagagttgttaaatttgattatatgttttttgtacgatattcgatagttgtttttttttttattagtttttttaaggttgtaaatatatttgatttacgtgagagtttttataagttagtataacgttaggttttaaggaggcgtttaataaatgttggtattgtagggttagatttcgagttttagtttagaattttgttgaggttaggttttttttttgtttttcgttttttattatatttatttatttttttaagtaattaagtttaaattggggtttgtgtagtgattggtcgcgtcgggttttattgcggatgaatttgatttgttttaatgatttgtgatagatatttgtagatagcgtttttaatagaattagggttaggttggtattaaattttaggaacgttaggtattgttttaaagtagatgtaaatcgttaaattttttaggatttagaaggattagagagagtcggatatttttggttagttacgcggtttttagtaaagtttattttttttttttttttagtgtgttttgttgttagagtaattgtgggcgttatcgagttgacgggcggaaatagaatagaaagagtatacgtttttagtttattgatagggttattgcgtagacgtattaatttttttgagttgtagttgagtttgttgatgtagttcgcgtttgcgtattagttgttacgcgttttggtcggttttagcgtttgcgtaaattggtatatcggggagggcggagttaggttacgagggtgcgtatgcgtaaatagtatattcggtgtggtcgacgggttttttaagagtttggggcgcggattggagtattttgcgtgtagttatgtcggcgtcggtagtgtttgttatttcgcggtttttagaagagtatttgagttttatttcgtagcgtttgaagttgttggacgcgtatttgttgtatatattgttgatcggggcgttgtagttcggttattgttttttcgtggggatttttttttttaatttttttttttcgggttttattttttgtgtggggagttttattttagcgggtaatggttttataagtgattataataataatgtgttattttggtgtgttgtttttgtttttatagtattttatattagattatcgttttttgaagttatgagaagagtttgtattgtttttttgttgtgaatggggaaattgaggtttagaaagtttagattatatgtttaatattaaacggtttcgtaggagttggatttaaaagtttaaagaaattattttcgtgtcgttattttatttggtgatttattttatttaatattggttcggggaaaattttattttaattttaatttaggtttaatataattttaaaattagtagattttttaaatgaaaaatttaattttgaattatttttgttattttggtttaattattattaattttcggtgaaacgttttaatgaaagtgtaaagaatataaatattggtgttttttttgttgaattattttttatttgattttgttttttagttgttattatttttttttttgttgaggaagttgttattttattgttttgaatttaatttttgtttatataattttattttagttttatttttttttttgattttaggatttggtaattttgtagattgttatatttagcgagaatagtttttattaatttttgttaaaatttgattttttttgtttaacggggatttagtgaatattgaaaataggcgtggtttttattattggtattatttgttattttgattttgaaaatatgttagtatttatggtttttttttagtgtgattattagttaggttattagttgtatttttagtttaatatgaggtattatggtaaaagttttggtatatgttttttattcgtaaagagtttatggtttagttggggtatagataaaatatagtattggaattgtttggaggtttggtatagtggtttatgtttgtaattttagtattttgggaggtcgaggtaggtagattatttgaggttaggagtttaagattagtttggttaatatggtgaaattttatttttattgaaaatatataaattagttaggtatggtggtatatatttgtaattttagttattcgggaggttgaggtagaatcgtttgaattcgggaggtggaggttgtagtgagtcgagatcgtgttattgtattttagtttgggtgagagtgaggtttagttttaaaaaaaaaaaaaaaaagtttggtgatagtggtgttgtgtttaaagttatagatttatagaatgtttattgtatatttatattgttttgatatattagagatattttttagaatttaaaataggtttgaggatttaatgatttgtgtattgaagttgtagattagttttttgattggatatttagttattatttttgatttttgttttagatgattaagatttagttgtttgtggtggcgtttttgtttttaggatgtgttaattattattcgattagatatattatttttttgttttaagtattttttattatttatttatcgttttttgttacggtattatatgtttttattagttagttcggagaaggaattttgatgagaatttttgatttaattttgtttgatgtttttgtttttaggtttggaagagtaggagtaaggtagggtttgaaagttgattttaaaaaagatgttttttttatgtagaagttattttgtttttataagtttttagggtttagaatgattttttatggatgttttgaagaatgtggtttgttgaagagtgggtatggattagagttatagattattagtgtaataaagttagaaggtttttttgagtaaatgatttttatttatgttaagatttgtttttgagttcgttgtggttgaaattgaattggtagattggattgttttttttttttttagtgggaattaggtggtttgttattgaagaaaaatttagtaaaagggtatattagtaatggggttaataagggggattaggatttttagatttgttagataatagataatagagttatagaaatgaaagtaattttaagaaaagaagggatttatgataatttttagttgttatagaagggtatgatttattttttttttgatagtattgatttttttaaattttgttttttttgttatttgttagtttagattattaattggagattggttttaatgggaaatttggacgtttattttttgttttgattgttggtaaaggtagttttgtttttttttatggtgttggggtttttaatttttttgtggaattttttgttgtaagagaatggaggagtttagtgagttgggagagggaaatgtaggcgatattgttgaaggattaggtagtgttgggtgttagatgtttgaatgttaggttaaggaatttggattttttttgagatggagttttgttttttttttttaggttggagtgtaatggcgatttcggtttattgtaatttttgttttttaggtttaagtaatttttttgttttagttttcgaagtagttgggattataggtatgtgttattacgttcggcgaattttgtatttttagtggagacggagtttttttatgttggttaggttggttttaaatttttgattttaggtgattcgtttgtttttgttttttaaagtgttgggattataggtgtgagttattgtgttcggttaggaatttggattttattttgtaggtaatagtaaagtttttgaagatgtttttttttttttttttgagacggagtttcgttttgttttttaggttggagtgcgttatttcggtttattgtaagtttcgttttttgcgtttacgttatttttttgttttagttttttgagtagttgggattgtaggcgtttgttattacgtttagttaagtttttgtatttttagtggagatagggttttatcgtgttagttaggatggttttgattttttgatttcgtgattcgttcgtttcggttttttaaagtgttgggattataggcgtgagttattatattcggtattgagggtgtttttttaaagaaaggaaaagatttaaaattggtgttagtatgtaggatgaattggagggaaatgttttttaattttttttatttttttttggtagtttatttttttttattttttttgtatgtgttagtttagtatatgttttttggaaattgattagtatattttaaattaatttagaacgttattaaatttttaaaaaatttgttgttattgggtttgatggtatgaaaatagtttgtttttttttatttttttatagttgagagatttaattatggttttaagaaggaattagaggtagaaagttgttattgagagatttttttttgtgtgtgttttggattattagagtataatatattggttttaaaaggattttagaggtagaatatttttttatttgagatagattttaaatatttagtagttgattgtttattttgtagttagatatttttagaagaggatatttgttttttttttagagttatattttagtgttggtaattttttagtttttttttttgtttaattgaaagttgtgtttatttaaagtgttatttaggagggataagtagaaaatattaagattgtttttaaaataagtttttggttttgaaataagttttaatttattttttaatttttatttgttttgttttttaatttatatgaggtaattttgttttaaaaaatagttttgttttttttagtttataaatttaaaattagtttgaatttgtaaggtaaggaggtttagtttagagttttttgttttacgggagttattaggttgttgtggattggggtttagtattttttttggaattatttattagatttgtggattttaatattattttttataattgttattcgagagattagaagtttgttatttatgtgtttgatagttttgtttttaaatattttttatattattgttatttttttattttttgttttagttttttaatattttttatgaagattattgtaattttttttattggtttttcggtttttggtttttagtttattttttattgtgtttgtaggtttgatttgatttgtaaatttgattgtgttatttttatgtataatttgtgttttttaaagtaaaattaaaattttttttttgatatataggtttttttatgatttggttttttcgttgtttgtagttttattttttgtttttgttttttttatattttgttttaatagtattgagttatttgttattttttgaatatttttatgtgttaaattatttgtttttgtttgattgtttttaaaatttttttattttttagattttttagtttaagtgtaatttttttttttttttgttattgtttttaaagagaataaggttttgttatgttgtttaggttggttttaaattttttggtttaagtagttttgttttagttttttgagtagttaggattataggtatatagtattatgtttggtttattgttttttggaatttttttttgattttttagtagattgaggttttttttttgtattttttttttattttgtatgtgtgtgtgtgagagagatatggtattgtgttgtatttgggtgtttgttttttttttggaaggtgagtttttgagggtaggggttgtttttttatttttttatttttagtgttgaatattgtatatgttaaatggtgagtaggtttatagttatgttaggaatagtgagtaatgatgtgttaggttttttgttaaggtgttgggaatttaattgtgaagtatatagacgtggtttttatttttatagagtttgtaattagtgggaaatatagataagtaaatatggatatggtgttgatggagaattattggtgagaatgggaatataatgtgtatttaattttgtttagtggttttgtaataatattttttttatatattcgtttttttaaagtaggttttataaattattttattttttttttttttttttatttttagttggtgattttgtttttatttttttattaaaaaaaagaagtagataagaatttttttatttttttattattgaattataatagattatttatttttatatttatattttttgattttttatggtggatgatgtgttttttttttgtgaaagttttgtttgtgtagaggatttagtttttttttgtttatttagggatttcgtttttgtaattatttttttgtttcgtgttattaatttttgttttttttttggattatttttattatataaatatgttttaatattgtttatttaaaaaaaattcgtttgattatagataattttttagttattattttattttttttttattattatagaattttttgaaagaataattaatgtttttatttttttttttaattatttattttttaatttatttttggtattggtttgttttcgttattttattgaattattttattgaaattatttttgttatgttgtaacgtttagtatttaatgtaggtattggtttttgtgtaaaaggaaagtttttttttgaatataatatttttttgtttgttttgttttattttattgtttttttttttttgttgttttgtgttgggcgtttttttgattgagagtatggttgtagatatttttattttgtatttttttttaaatagataaatttaaataatatttgtatatttataattatttttttatatttttagttttgaattgtttttcgaattttaaattagtaaatttagttgttaatttgatgtttttatttgatgtttgatatgtattttgaatttaatatgtttaagattaaatttgtttatttagttatttgtttttttattagttagtacgtggtgttaatgttggttgtggttttttttttttttttttttgagatatagttttattttgttatttaggttggagtgtagtggtataatttcggtttattgtaatttttatttttcgggtttaagtaatttttttgttttagttttttgagtagttgggattataggtacgtttttttatgttcggttaatttttgtatttttagtagagacgaggtttcgttatgttggttaggttggttacgaatttttgattttaggtgatttatttatttcggttttttaaagtgttgggattataggcgtgagtcgttatgttcggtcggttgtgtttttaaatgaagaaatttaagttttcggggttttttgattttttttattttttgtatttgttttattagtaagttttgttttttttaaaatatagtttgtatgtttttatttttgtttatttttattattatttttttgagttttttgggttttaagtaatttttttgtttttttttattttttatatttttgagacggagtttcgttttgttgtttaggttggagtgtagtggcgcgatttcggtttattgtaagtttcgtttttcgggtttacgttatttttttgttttagtttttcgagtagttgggattataggtattcgttataatgatcggttaattttttttttttttttgtattttttagtggagatgggttttattatgttagttaggatggtttcgattttttgattttgtgattcgttcgttttggttttttaaagtgttgggattataggtgtgagttattgcgtttggtttatttttatttttatttttatttttttgagacgtagttttattgtgtcgttaggttggagtgtagtggcgcgattttagtttattgtaattttcgtttttggagtttaagcgatttttttgttttagtttttttagtagttgggattttaggagtttgttattgtattcggttaattttttgtattttatttttagtagagatggggttttatttttttgattaggttggttttgaatttttgattttgtgatttatttatttcggttttttaaagtgttgggattataggcgtgagttattgcgttcggttttttgtttttttttaattttgcgaattattatattgttttatcgtttttataattgaatttatattgttttttgaggtttattatgttttttaggatttggtttttgtgtttttttttttgattattatagttttgttggtttgtttttgatttttttttttttttttttttttttttgagatggagttttgtttttgttgtttaggttggagtgtaatggtacgatttcggtttattgtaattttcgtttttcgggtttaagcggtttttttgttttagttttttgagtagttgggattgtaggtatgtattattaagtttggttaattgttttgtatttttagtagagacggggtttttttatgttggttaggttggtttcgaattttcgattttaggttatttattcgtttcgattttttaaagtgttgggattacgggtgtgagttattatgtttggcgtttgtttttgtgtttataatatgttaagattgtttttattgtttagaatgttttgtttttagatttttatatggttggttttttattttttaaatattggttttaaatagtaagtttttaaagagattttttgttatgattgaatttaagaaaagttttttagttattttttattattttgttttattttttttatagtatatatttttatttagtagtttttggtttatttgttaatttattgattatatgtttttttttataggagtgtaagttttttgagagttagattgttttgttttgtgttatatttttagtatttgaaatgatgtttgttatgtagtagatgtttagtaaatattttatggaataaatggatatttaaggggatagagtaaattagaattgttaaaatggaatagattgtttgaagaggtagtaaatttttatttttggaagtgtttagggagagattgaaggattattggtagtggagtattttgaataggtttttttttttgttttttttgtttttaatgtatttgagagatgtgatatttttattagtaatataggttttggaaagttgataattttttatttggaggtggtttattagattttgtaagtggtgagtatattttggaaagttttttacgtgattagtacgtttttttaagtatggttattttttattattttttgggtattgtatatattaaatggggtgttggtgtttatgatttttgaggttttttttaattttgtgggattttgatttatatgtttttattgaaataatttggttattatgattataataataataatattaatttattattttatttatttttatggataattttttttttttttttttatatttttttaaaatttaatatcgtgttttttattttaatgattattattaatagttttttatttttttagatttttttttagattttaattgaaatgataagataattatgtatattattatatgtaaataaaatattttattttttttttgagacggttttgatttgttttttaggttagagtgcggtggtatgattgtggtttattgtagtttgtaatttttattttttgggtttaagtaatttttttattttagtttttcgagtagttggggttataggtgtgtgttattatatttggttaattaaaatattttttttgtagagatagggtttttttattttttttaggttggttttaagtttttgggtttaagcgatttttttattttggttttataatatgttggggttatagttgtgagttattatgttttggttaagtgaaattaggaatgggttgggtgtgggggtttatgtttgtaatttttatttttaggtaagtagaggcgggaggattgttgggtaatatagggagattttgtttttattaaaaataaataaaaaaattagttaggtatggtggtgtatgattgttgttttagttatttagggggttgaggtgggaggattgtttgagtttaggaggtcgaggttgtagggagttatgattgtattattgtattttagtttgggcgatggagtgagattttgttttaaaaaaaaaaaaaaaaaaaggattggtttttttttatttaataagttttagatatgtttgttgttaatgtatagagaatttattttatttttttgaataattgtatgggattttattgtatgttagttgtatagtttaatttttttgatgtttagattgttttaattttttttttaattttataaatatatttttagaatgtttttgttttgtaagataaatttttttgttaaaaggtaaaattattttaaatattaatggatattgttagttgtttttttaagtggatgaatgaatttgtattttttatagtaggggtttatattggttatttttgttttagttattgtttttaatatttttaagggtttggatatttgaaaggattaatggtgtttttatggtgtttatatgtttaagtataatgaaaattgttgttatggtgataggttttggagaattagtttgatagttttttggtttttggattagatttgtttgttgtttttttttagttaatgatgggatgatgttagtttgaagcgagtttaggtttttttaagtaatgtaataatttattataggtataaagatatttcggaagagtgtatttttggaattgtttgtttttttttttttgttaatggtgattgttagaatttttaaggggatggagtgtggtagtggagagtttttatgaattattttttttaggttttttgttttttttgagataaataagtagttgttagaatttcgagattaaagatagtttatcgagaattgtgaggtttttaagaatgagcgtgttatttttataaattttgttatttattaaatgaatattttattagaaaataatttatatttttataattttttattatttagttcggattttttgttgttgttttaagtgtatttttatttaggtataattagaaatttttaaattagtagataagagagttttgtgggttttttggttatatatttttttttttgagaaagtttttaggttttagtgtaattttgagaagtaatatttttttttttttaatagagtgcgaaatttaattgtataatttgataaatttttaaatgtatttgtttaattattatttagattaagatgtaggatattattagtattatagatgtttttttgtatttttttagttattttttttttgtgaaagataaaaattattattttgttatagattggttttattaagttttaagttttttgtatatggaattatatagtatatatttttttgttttgttttgttttgagacggagttttttttgtttaggttggagtgtagtggcgtaatttcggtttattgtaatttttattttttgagtttaagtaaatttttttgttttagttttttgagtagttgggattataggtgcgtgttattatgtttagttaatttttgtagtttttattagagatggggtttttttatgttggttaggttggttttgaatttttgattttaggtgatttatttattttggttttttaaagtgcggggattataggagtgagttatcgtgtttggtttttgttttattttttaatttttttttttttagatggagtttcgtttttgttgtttatgttagagtgtaatggtacgattttggtttatttttatttttatttttattaatttttttgttttattgttttagtttgttaagtaattgggattataggtatgcgttattatgttcggttaattttgtatttttagtagataaggggtttttttatgttggttaggttggttttgaattttcgattttaggtgattcgtttgtttcggttttttaaagtgttgggattataggcgtgagttatcgtgttcggttttttttttgtttgtttttggttaagataaaatatgataaaatttattattttaattatttttaagtgtatagttttgtggtattaagtatatgtatattgttgtaaaattattattattatttatatttagaatttttttgtttttcgtaattgaaatttagtttttattaaatagtaattttttatttttttttttgttagtttttggtatttattattttattttttgtttttaggagtttgattatttttgatgttatataagtgaaattatatggtatttgtttttttgttatggtttatgttatttaaaataatgtttttaagatttagttatgttgtagtaggtattagaatttttttttttttaaggttgagtattttattgtatgtatatattatattttgtttattcgtttttttgttgatatttgggttgtttttattttttggttattgtgattaatgttgttatgaatatgggtatgtaaatattgtttgagagtttggttttattttttatttttttaattttttagatggagttttttttttgttatttaggttggagtgggacggagtgatgtcggtttattgtagtttttattttttgggtttaagcgatttttttgttttagtttttttagtagttgggattataggcgtttattattacgtttagttaatttttgtatttttagtagagacggggttttattatgttggttaggttggtttcgaatttttgatttcgggtgattcgtttggtttagttttttaaagtgttgggattgtaggtgtgaattattgtgtttggtcgagattttgtttttattttttttggatatgtatttagaagtggaattgttggattatatgatatggtaattttgtttttaatttttttgaggaaacgtagtattgttttttatattggttattttatttgatttttttatttgttagtgtataagggttttagtttttttgtatttttgttaatttttgtttttttgatattagatattttaatagatgtgaggtgatatttcgttgtaattttgatttgtattgttttagtgattaatgatgttgagtatttttttatatgtttgttggttatttttatattttttttggggaaatgtttatttaagttttttgtttattttaaaatttggttattattttgttgttaattgtattgtaggggtattttaatatattttgatattaattttttattagataagtgatttgtaaatatttttttttatttcgtaggtgtttttttattgttgtgttttttattgtatttttattatagaagttttaaattttgatatagtttaatttatttatttttattttgttgattatatttttggtgttatatttaataaattattgttaaatttaatgttataaaatttttgttttgtttttttttaagagttttttagtttttggtttttatttatttcggatttaggtttttgattcgtttcgagttaatttttgtagtatatggtataaggtaagggtttagttttatttttttgtttatggatatttagtttttttagtatcgttggttgagaagattgtttttttattgagtggttttgttagtttggttgaaaattatttgattttgtatacgagggtttttgtgtgttttttaaaaaataaagtaattaaattgatttattttttaattgtagtaaatgtatttttaaaataaatttataatggaaaatttgaattattatttttaaatagaaggttatattaaaaatattatggagttaggtagatgtgtttattcgtgtttgtggttttagttgtttaggaggttgaggtgggaggatcgtttgggttttagttcggtttgggtagtattattagattttgttttttgtcgagtttttagtggttttgtgtggttgtattttagaatattttttatttaattgagggggtatatttgtttttttagtatatatatttaggttttgttttgtggtttttgtgtgggagttgggtttttttgtttttggttttttttgggtatttgttaggttttagttggtttggttagttagtgtgtattttttaagttttgttcgggtacggtggtttatgtttgtaattttagtattttgggaagtcgaggtaggtggattataaggttaggagttcgagattagtttggttagtatggtgaaatttcgtttttattaaaaatataaaaaattagtcgggtatggtggcgtatgtttgtagtttcggttatttgggaggttgaggtaggagaattgtttgaatttagtaggtggagattgtagtgagtcgagattatgttattgtattttagtttgggtgacggagcgagattttgttttcgattttttaaaaaataaagtttttgattgtgttgtttaatttatttgtgtaatttatttatttttgtgtatagtagaagtttttttttattgtagtataatattttattgtttgtatatgttataatttatttattttattgttgatagatattagattgtttttagtttggggttatttgggtattatttttgtgtatgttttttgatgtatatatgtatttatttttgttagagtagaattgttgggttttcgggtatgtttgtgtttattagtatatttattttatatttttatataattatttttttgtgttttgttttttgtgtagt

SEQ ID NO: 32 - DNA, 18997 bp, Artificial Sequence
  chemically treated genomic DNA (Homo sapiens)
attgtataagaagtaaaatataaaaaaatgattatatagaagtataaaataaatatgttaatgaatatagatatattcgaggatttaataattttattttaatagaaatgaatgtatatatatattaaagggtatatatagaaatgatatttagatagttttaaattggaaataatttaatgtttattaatagtaaaatggataaattatagtatatataaataatagaatattatattgtaatgaaaaagaatttttgttatatataaaaatggatgaattgtataagtaagttgggtaatataattaaaaattttattttttggggagtcggggatagagtttcgtttcgttatttaggttggaatgtagtggtatgatttcggtttattgtaatttttatttgttgggtttaagtaatttttttgttttagttttttaagtagtcgggattataggtatgcgttattatgttcggttaattttttgtatttttagtagagacggggttttattatgttgattaggttggtttcgaatttttgattttgtgatttatttgtttcggttttttaaagtgttgggattataggtatgagttatcgtgttcggataaaatttaaaaaatatatattggttggttaaattagttggaatttggtaggtatttagaggaagttaaagataaaaaagtttagtttttatatagagattatagggtagagtttaagtgtatatgttgggggaataaatgtatttttttaattagatgaggaatattttgggatgtagttatatagagttattgagaattcggtaggagatagggtttggtggtgttgtttaggtcggattggaatttaagcgatttttttattttagttttttgagtagttgggattataggtacgggtgaatatatttgtttagttttatggtatttttagtgtgattttttatttagggataatgatttaggttttttattataagtttattttaaaaatatatttattatagttaaaaaatgaattaatttaattgttttgttttttaagaaatatataaaaattttcgtatataaaattaaatgatttttaattaaattgataaaattatttaatggggaaatagtttttttaattaacgatgttgggaaaattggatatttataggtaaaagaatgaagttggatttttattttatattatatattataaaaattaattcgaaacggattaaagatttaaattcgaaatggataaagattaaaaattaaaaaatttttagaagaaaatagagtaaaagttttatggtattggatttagtaatgatttattggatatgatattaaaagtatagttaataaagtaaaaatagataaattggattatattaaagtttaaaatttttgtgataaaggtataataaagggtataatagtgaaaaggtatttacggaatggggaaaaatatttgtaaattatttatttgataaagggttaatattagaatatattaaagtatttttataatgtaattaataataaaataataattagattttaaaatgggtaaaggatttgaatagatatttttttaaagaagatataggaatggttaataagtatatgaaaagatgtttaatattattaattattagggtaatataaattaaaattataacgagatattattttatatttattaggatgtttagtattaaaaaaataagagttggtaagaatgtagagaaattgaaatttttgtgtattaataagtgggaaaattaaatagggtagttagtgtgaaaaatagtattgcgtttttttaaaaaaattaaaaatagaattgttatattatataatttagtaattttatttttgggtatatatttaaaagaagtgaaagtaggatttcggttaggtatagtggtttatatttgtaattttagtattttgggaggttgaattaggcggattattcgaggttaggagttcgagattagtttggttaatatggtgaaatttcgtttttattaaaaatataaaaattagttgggcgtggtggtaggcgtttgtaattttagttattagggaagttgaggtagaagaatcgtttgaatttaggaggtggaggttgtagtgagtcgatattatttcgttttattttagtttaggtgataagagagaaattttatttgggaggttgggagggtgggggatggaattaggtttttaagtaatatttgtatatttatgtttatagtagtattagttataatagttaaaaggtgagagtagtttaagtgttagtagaagaacggataagtaaagtgtgatgtatatatataatggaatatttagttttaaaaggaaggaaattttgatatttgttataatatggttgaattttgaggatattattttaagtgatataagttatgataaagggataaatattatgtggttttatttatatgatattaagagtagttaaatttttagaaatagaaagtggaatggtagatgttagggattgatagagaggaggatgaggagttattgtttaatgggaattgaattttagttgcggaagataaaaaagttttggatatggatagtgatgatgattttataataatgtatatgtatttaatgttatagaattatatatttaaaaatggttaaaatggtaaattttgttatgttttattttgattaaaaataaataaaaaaaaggtcgggtacggtggtttacgtttgtaattttagtattttgggaggtcgaggtaggcggattatttgaggtcgggagtttaagattagtttgattaatatggagaaattttttgtttattaaaaatataaaattagtcgggtatggtggcgtatgtttgtgattttagttgtttggtaggttgaggtaatgaggtaggagaattggtggaggtggaggtggaggtgagttaagatcgtgttattgtattttagtatgggtaataagagcgaaattttatttaaaaaaaaaaaaattaaaaaataaaataagggttaggtacggtggtttatttttgtaattttcgtattttgggaggttaaggtgggtggattatttaaggttaggagtttaagattagtttggttaatatggggaaattttatttttaataaaaattatagaaattagttgggtatggtggtacgtatttgtaattttagttatttaggaggttgaggtaggagaatttgtttaaatttaggaggtggaggttgtagtgagtcgagattgcgttattgtattttagtttgggtaagagagatttcgttttaaaataaaataaaataaaaaagtatatgttatatgattttatgtataaaaagtttaaaatttggtaaaattaatttatggtaagatagtggtttttattttttatagggagaggataattgggaagatgtaaggaggtatttatggtgttggtaatgttttgtattttgatttggatagtggttagataggtatatttaaaaatttattaagttgtataattaaatttcgtattttgttaaaggaaaaaaaatattattttttagagttatattgaaatttagaggtttttttagagaaaaaaatatataattaaaaaatttataaagtttttttatttgttgatttaaaggtttttaattatatttagatggggatgtatttgaggtaataataaagggttcgggttgaatgataaaaagttataaaaatgtgaattattttttaatagaatatttatttaatgggtagtagagtttataaagatagtacgtttatttttgagaattttatagttttcgataaattatttttgatttcgaagttttagtagttgtttatttgttttaaaaaaggtagaagatttaagagagataatttatgagaattttttattgttatattttatttttttgaagattttaatagttattattgataaaaaaaaaaaaataggtagttttaggaatatattttttcgaagtatttttatgtttgtgataaattattatattgtttaagaaaatttaaattcgttttaggttagtattattttattattaattaagaaaaagtaataaataaatttaatttaaaggttagaaaattattagattagttttttagagtttgttattatggtaatagtttttattatgtttaaatatgtaaatattatggaagtattattgatttttttaggtatttagatttttaaaaatattaaagataatgattgaagtaagggtaattagtgtaaatttttgttgtagaaagtatagatttatttatttatttgggagagtaattagtaatatttattaatatttaaaatgattttattttttgataaaggaatttattttatagaataaagatattttgaaagtatgtttgtaaagttgaaaaaaaaattaaaatagtttaaatattaaggggattaaattatataattgatatgtaatgaaattttatgtaattatttaaaagaataaggtaaattttttgtatattgatagtaaatatatttaagatttattaagtgaaaaaaagttaattttttttttttttttttttttgagatagggttttattttatcgtttaggttggagtgtagtggtgtaattatggttttttgtagtttcgattttttgggtttaaataatttttttattttagttttttgagtagttgagataatagttatgtattattatgtttagttaatttttttgtttgtttttggtaaagataaggtttttttatgttgtttagtaattttttcgtttttgtttgtttaagggtagggattatagatatgagtttttatatttagtttatttttaattttatttggttagggtatggtggtttataattgtaattttagtatgttgtgaaattaaggtgggaggatcgtttgagtttaagagtttgagattagtttgggaaagatagggagattttgtttttataaaaaaaatgttttaattagttaggtgtggtagtatatatttatggttttagttattcgggaggttgagatgggaagattgtttgagtttaggaggtagaggttgtaggttgtagtgagttatagttatgttatcgtattttggtttgggagataaattaagatcgttttaaaaaaaaagtaaaatattttatttatatataatgatatatataattattttgttattttagttagaatttagaaaaaaatttgaagaaatagaaaattattaatagtggttattggagtaaagaatacggtgttgagttttgaggaaatatgagggaaaaaaagaaaaattatttatgaaggtggataaggtaataaattgatgttattattattgtgattatggtaattagattattttaatgaaaatatatgaattagagttttataaagttggaaaggattttagaggttataaatattaatattttatttgatgtatataatgtttaagaggtggtagggggtggttatgtttggggaggcgtattaattacgtgggaagttttttaaagtatatttattatttatagaatttggtaagttatttttagatggagaattattaattttttagagtttgtgttattgataaggatattatattttttagatgtattggaaataaaaaaggtaaaaaaaaaagtttgtttaaaatgttttattattaatgattttttagtttttttttgggtatttttaaagatggaaatttattatttttttaagtagtttgttttattttagtaattttgatttattttatttttttaaatgtttatttattttataaaatatttattaaatatttattatatgataagtattattttaggtgttaggaatatggtatagaataaaatagtttggtttttaaggaatttatatttttatggagagaaatatataattaataagttaataaataaattaggaattattaggtagagatatgtattatgaagaaaataaaataggataataaagagtgattgggaagttttttttaaatttaattataatagaaggtttttttaagagtttgttatttaagattaatatttgaaagataaggaattaattatgtaaaaatttgggggtagagtattttagatagtaagaataattttgatatgttataaatataaggatagacgttaggtatggtggtttatattcgtaattttagtattttgggaggtcgaggcgggtggataatttgaggtcgggagttcgagattagtttgattaatatggagaaatttcgtttttattaaaaatataaaataattagttaggtttggtggtgtatgtttgtaattttagttatttaggaggttgaggtagaagaatcgtttgaattcgggaggcggaagttgtagtaagtcgagatcgtgttattgtattttagtttgggtaataagagtaaaattttattttaaaaaaaaaaaaaaaaaaaaaaaaaaattaaggatagattaataagattatagtgattaaggggaaggatataagggttaaattttgaggggtatggtaagttttagaaaatagtatggatttagttataagagcggtggaatagtataatggttcgtaaggttaaaaagaggtagaaggtcgggcgtagtggtttacgtttgtaattttagtattttgggaggtcgaggtgggtggattataaggttaggaatttaagattagtttggttaagaaggtgaaattttatttttattaaaaataaaatataaaaaattagtcgggtgtagtggtaggtttttggaattttagttattagggaggttgaggtagaagaatcgtttgaattttaagggcggaggttgtagtgagttgagatcgcgttattgtattttagtttggcgatatagtgagattgcgttttaaaaaaataaaaataaaaataaaaataggttaggcgtagtggtttatatttgtaattttagtattttgggaagttaaggcgggcggattataaggttaggagatcgagattattttggttaatatggtgagatttatttttattaaaaaatataaaaaaaaaaaaaaaattagtcggttattgtggcgggtgtttgtagttttagttattcgggaggttgaggtaggagaatggcgtgaattcgggaggcggagtttgtagtgagtcgaaatcgcgttattgtattttagtttgggtaatagagcgagatttcgttttaaaaatataaaaaataaaaagaagtagaagaattatttaggatttaaagagtttaggggaatggtagtaaaaatggatagaaataaagatatataggttatattttggagaagatagagtttgttgatgaaatagatgtaggagataagagaaattaagggatttcggaaatttaaatttttttatttaaaaatataatcggtcgggtatggcggtttacgtttgtaattttagtattttgggaggtcgaggtgggtgaattatttgaggttaggagttcgtgattagtttggttaatatggcgaaatttcgtttttattaaaaatataaaaattagtcgggtatgggggagcgtgtttgtaattttagttatttaggaggttgaggtaggagaattgtttaaattcgggagatggaggttgtagtgagtcgagattgtgttattgtattttagtttgggtgatagagtgagattatgttttaaaaaaaaaaaaaaaaaaaattataattaatattgatattacgtattaattggtgaagaggtagatggttggatgagtaggtttgattttggatatgttaagtttaaggtatatattagatattaagtgaagatattaagttggtaattggatttattaatttggaattcgggggatagtttaaaattaaaaatataaaggagtagttgtaggtatataggtgttatttaagtttatttatttaaaaaaaaatataaagtgaaggtatttataattatgtttttagttagagaagcgtttagtataaaatagtagaaaggaaaaagtagtgaggtgagatagaataagtaggagagtgttgtatttaagaaaaaattttttttttatatagaagttaatatttatattaaatgttaaacgttgtaatatggtaagagtagttttagtgaagtaatttagtgaagtagcgaggatagattaatattaagagtgggttaaggaatgaatagttaagggaggaagtaggaatattaattatttttttaagaaattttgtaatgatggaaaggaaatgggatggtagttagaagattatttgtggttaaacggattttttttaaatagataatattagaatatgtttgtatgatgggaatgatttaggagagaaatagaaattaatgatacggaatagaggaataattgtagaagcggagtttttgagtgagtaagggaagattggattttttgtataagtagagtttttataggaaagagatatattatttattatgagaagttagagagtatgggtataaaagtaggtgatttgttatgatttagtggtgaaaagatgaaggaatttttatttattttttttttttagtgaaaaaataaaagtaagattattaattaagaataaaggaaaagaggaaaaatagagtgatttatgaagtttattttaggaaggcgaatgtataagagaaatattattgtaggattattaggtagggttggatgtatattgtgtttttatttttattaataattttttattagtattatatttatatttatttgtttgtattttttattaattataaattttgtgagagtagaagttacgtttgtgtgttttatagttgaatttttagtattttggtagagaatttagtatattattgtttattatttttgatatgattataggtttgtttattatttaatatatatagtgtttagtattgaggatggagagatgagaagatagtttttgtttttaagggtttattttttagagagaaggtagatatttaaatatagtataatgttatattttttttatatatatatatataaggtgaaaaaggaatatagaggaaagattttaatttgttggagagttagggaagggttttaaagggtaataagttaggtatagtgttgtgtgtttatagttttagttatttaggaggttgaggtaggattgtttgagttaaggagtttgaggttagtttgggtaatatagtaagattttgttttttttaaaaatagtaataaaaaaaaaaggaaattgtatttgagttgagaagtttaaaaagtgaaggaattttgaaggtagttaagtaaaggtaaatagtttgatatatgagagtgtttagagaatgataagtagtttaatattgttggagtagagtatagaggaggtagaggtaagagatgaagttgtagatagcgaggaagttagattatgaaagagtttgtatgttaaaaaaaaagttttaattttattttgggaaatataaattgtatatgggagtgatataattagatttgtaagttaaattaagtttgtaaatatagtagaagatggattggaaattagaggtcggaaggttagtaaggaggattatagtagtttttataagagatattgagaggttaaaatagaggatgaaaaagtagtaatgatatgaaagatatttagaaataagattattaggtatatgggtggtaaatttttaatttttcggataatagttatgagagataatattaggatttatagatttgatggataattttaaaagaaatgttggattttagtttataatagtttaatagttttcgtgagatagaaaattttggattaggtttttttgttttatagatttaaattggttttgaatttgtaaattaggaaaaataaaattattttttaagataaaattattttatatagattagagaatagaatagatgaaagttgggaaatgaattaaaatttgttttaagattaaagatttattttgaggatagttttaatgttttttatttattttttttaaatagtattttaaatgagtatagtttttagttgggtaaaaaaggaaattaaagggttgttaatattggaatataattttaaaaaagggatagatgtttttttttagagatatttaattataagataaatagttagttattggatgtttgaaatttgttttaaatagaaaaatattttatttttgaggtttttttaaagttaatatattatattttgatgatttaaaatatatataaaaaaagattttttaatgataattttttatttttggtttttttttgaaattatggttaagttttttagttatgagggaatagaagaaaatagattatttttatattattaggtttaataataataggttttttaaaggtttggtagcgttttgaattggtttaaaatgtattggttaatttttaaagagtatatgttaaattaatatatgtagagggaatagaagagaatagattgttaaaaaaaaatagagaagattaaagaatatttttttttaatttattttatatgttaatattaattttaaatttttttttttttttaaaaaagtatttttagtgtcgggtgtggtggtttacgtttgtaattttaatattttaggaggtcgaggcgggcgaattacgaggttaggagattaagattattttggttaatacgatgaaattttgtttttattaaaaatataaaaatttagttggacgtggtggtaggcgtttgtagttttagttatttaggaggttgaggtaggagaatggcgtgaacgtaggaggcggagtttgtagtgagtcgagatggcgtattttagtttgggggatagagcgagatttcgttttaaaaaaaaaaaaaaaagtatttttagaagttttattattatttataggataaagtttaaatttttggtcgggtatagtgatttatatttgtaattttagtattttgggaggtagaggtaggcggattatttgaggttaggagtttgagattagtttgattaatatggagaaatttcgtttttattaaaaatataaaattcgtcgggcgtggtggtatatgtttgtaattttagttatttcggaggttgaggtaggagaattgtttaaatttgggagatagaggttgtagtgaatcgagatcgttattgtattttagtttgagaaaaaagagtaaaattttattttaaaaaaagtttaaattttttggtttggtatttaaatatttagtatttagtattatttaattttttaatagtatcgtttatattttttttttttagtttattggatttttttatttttttgtaataggaaattttataggaaagttagaaattttagtattataaaaaggaataaggttatttttgttaataattaaaataaaggataagcgtttaaattttttattaaaattagtttttagttgatgatttaggttaataaatggtagaagaggtaggatttaggaaagttaatgttgttaaaagaagggtaaattatatttttttgtggtaattaagaattattatgaattttttttttttttgaagttgtttttatttttatagttttattatttgttatttaatagatttggaaattttaattttttttattggttttattattaatatgtttttttattaggtttttttttaatgataagttatttagtttttattggagaggagaaaggtagtttagtttgttaatttaattttagttataacgggtttaaaaataggttttggtataagtgaaagttatttgtttaaaaaaattttttggttttattatattgataatttataattttagtttatgtttattttttagtaaattatattttttaaagtatttatgaaaaattattttagattttagaggtttatgaaggtagggtgatttttatatggagaaggtattttttttaaaattagtttttagattttgttttgtttttatttttttagatttggaaataaaaatattaaataaaattaaattaaaagtttttattaaggtttttttttcgggttggttaataaaaatatatagtatcgtggtagagggcggtgggtgggtggtggagaatatttagagtaaaggggtagtgtatttggtcggatgatggttaatatattttgaaggtaaggacgttattatagataattaggttttggttatttaggataaaagttaaagatggtaattaaatatttaattaaaaggttaatttgtaattttagtatataagttattagatttttagatttgttttaaattttaagaaatatttttggtgtgttagaataatgtaaatgtataataagtattttataggtttgtaattttaagtatagtattattgttattagattttttttttttttttttgaggttgagttttatttttatttaagttgaagtgtaatggtacgatttcggtttattataatttttatttttcgggtttaagcgattttgttttagtttttcgagtagttgggattataggtgtgtgttattatgtttggttaatttatgtatttttagtagagatggggttttattatgttggttaggttggttttgaatttttgattttaagtgatttgtttatttcggttttttaaagtattgggattataggtatgagttattgtgttaggtttttagataattttaatgttgtattttgtttgtattttaattagattataaattttttacggataaagaatatgtgttaaagtttttattataatgttttatattggattgaaaatataattgatgatttgattgatgattatattgaaaagaaattatgaatgttggtatgtttttaaagttaaagtagtaggtgatattagtgatagaggttacgtttgtttttagtatttattgaattttcgttgggtaagaaaagttagattttaataaaaattgatggagattgttttcgttaaatatagtagtttataaggttattaaattttggaattaaaaggaaaaataaggttaaaatagagttatgtgaataaaaattgggtttaggatagtgaaataatagtttttttaataagaaaaaaagtagtagtagttaaaaggtaaaattaagtaaaggatgatttaataagaaaagtattagtatttatattttttgtatttttattgaaacgttttatcggagattggtaatgattaggttaagatgatagagatgatttaaggttgggttttttatttgaaaagtttattaattttagagttgtgttaaatttaagttaaagttggaatagggtttttttcggattaatattaagtgaagtggattattaagtggagtagcggtacgaaggtggtttttttagatttttaagtttaatttttacggagtcgtttggtattaggtatataatttaagttttttgagttttaatttttttatttataataaaagggtaatgtaggttttttttataattttaaggggcggtggtttgatatagagtattatgaaaataaaagtagtatattaaagtaatatattattattatgattatttatagaattattattcgttaggatgaaattttttatataagagatgaagttcgagagaaaagagttgaaggggaaggtttttacgaggagatagtaatcgaattgtagcgtttcggttagtagtatatatagtaggtacgcgtttagtaattttagacgttgcggagtggagtttaagtatttttttaagaatcgcgaaatgatagatattatcgacgtcgatataattgtacgtaaggtattttagttcgcgttttaaatttttggaggattcgtcgattatatcggatgtgttgtttgcgtatgcgtattttcgtgatttaatttcgtttttttcggtgtgttaatttgcgtaggcgttgaggtcggttagggcgcgtaataattaatgcgtagacgcggattgtattaatagatttaattataatttagaaaagttaatgcgtttgcgtaatggttttattaatgagttggggacgtgtattttttttgttttgttttcgttcgttagttcggtgacgtttatagttgttttggtaataagatatattgggaggaagaggggaataagttttattggggatcgcgtagttaattagaggtattcggttttttttggtttttttgagttttggaagatttaacggtttgtatttattttgaggtaatgtttggcgtttttggggtttgatattagtttgattttaattttgttaagggcgttgtttgtagatgtttgttatagattattggaataagttaagtttattcgtagtgagattcggcgcggttaattattgtataggttttagtttagatttaattatttgggggagtgagtgggtgtggtgaggggcgggaggtagggaggaagtttgattttagtagggttttgaattggaattcgggatttggttttgtaatgttaatatttattgggcgtttttttggggtttgacgttgtattaatttgtagggatttttacgtgaattagatatatttgtagttttaaaagagttggtgaagggagggatagttgtcgaatgtcgtgtaaaaagtatatggttaagtttagtagtttttttttcgtaagttggtattttgaatttggtgtaatatttcgggatgttagcgtcgaaaggttcgaaagagtatgtttggtttaattttattttttttaatttattttgtagaagaaattgaaatggttttaggttttgtattttaataagtgggattattttgagggttttaattgtttttttttttttttttttgagacggagttttgttttgtcggttaggttggagtgtagtgtcgcgatttcggtttattgtaattttcgtttttttagtagttgggattataggtacgcgttattacgttcggttaatttttgtatttttagtagagacggagttttattattgttagttaggttggtttcgaatttttgattttgtgattcgttagtttcggttttttaaagtgttgggattataggtatgagttattgtattcggtttgttttaattttttttaagaaattaagttttggttttcgttgtttttttaattttacgtgaattcgattttttagatttagtttattttattttttagttgtaagtttttttatatatgattaggtattttatttttagttttttaatattttgaattgtacgtgagtaaaatttttaaaatagtaggtgaataatagcgtttttgtttttttattttttttttttttttttttgagatgaagttttgtttttgttatttaggttggagtgtagtgaatggtgcgatttcggtttattgtaatttttattttttgggtttaagttatttttttgttttagtttttcgagtagttgggattagaggtatttgttattacgttcggttaatttttgtatttttagtagaaacggggtttcgttatgttggttaagttgattttgaatttttgattttaggtgatttgtttgttttagttttttaaagtgttgggattataggagtgagttattgcgtcggtttttttttattttttatttgtttttagattggaaattttatacgtattaattaacggatgtattattagtggtgattaaagttttatttaagttttagaaagaagagaaataatttaagaaatttttagagtttatttgaatagatagatttatatttatattcgtggagatttgtgtagttatatgaatataagtttagtttaaatttatgttgttgagaaagaaaaaaaaagagtggataataagttggtttttattttaatataatatggtaggaagtattaatttttttgataagttgaatttttttttttgttttattaataagtaggagggtagtttttttacgaatatttaattttaaattttataggttaggttgatgttttttaattatttaggtgtggattttttagggagtttttgttttattagttaggttttttttagtgtttttttttttatgttttgtttgtttttgatttatgttaattattattattaagatttttttaggaatttttataggagagaagaagagatgaaaaatattaaatggatttattgaatgtatttgtttttgagatttgttagttatattaatatattatattagggtttttttgaattatttaaaatagtaagaaaaggtttatttttttatttagtttatgattttataattattgaaatatttttaattgatttgttaataggaaattgttaatattagtgttgattttaattagtttaaattagaatattaatatagtttaaaatttttgtttagagtagtggataagagtgtaagttttagaattagatagttttaggtttgaattttgattttgttgtttattagttgtttaatttggaataagttatttagtttgatagttttattttttttttttataaaatagaaataataatatttggtttattgaaattatgtgaggattaaatgagataatgttaagtattaagttgttagtatagtgtttggtagatagtaaatgtttagtaaatgtttgtttttattaattattattaattttagtaattaattatgtttgttttttttagttttttgaatgattaaaagttagttaaattatagcgtttttaataatttgggtatgtaaaagatagtattggagggattgtaatttaaatggtttttaaagggtagatttaatttataagttgaaattgaagttagagtatattttaggggttttattatataaaataatggaagagtggaggagtaagagggtttttttaagggtaaagtttatgattttatattatatattttttataaaaagaaattatattatttattaaaagaaatataaattttttaaagtttgagtagataataatttttttaaaggaaattttcgtatggaaaagaatgttttttttatttttttttttttgtattgttacgtttgttttaagatttttttttttgtttttgttaattgttattgtatatataatttttattttttaaattttggttttagtgtgattaaaattttttttttttgttttttaatagaatagataaaataggttattatttttagaaataaaaatttaaggagaattaagttgtaaatagtataaagttaaatttttaaagtattaagtttttgattaagttttagtaaagtagtaaatatttttagtgaatttatatttttttatttttttagtttttgatgaagtggaataattttttagtttttttgtttggttttttttttttttagttgtttgggagttttaaaaaagttttagttttgtttttttgttggtattcgaaagtgagtttattatattgttttttttaagagtagattatttattataatatggggttgaaattattagtgtttgagtaatagtgtgtaatagaattttttgtgataatgtttttgtattgtttagtatagtaattgttagatatatgtggttattgagtatttaaattagttagtgttgtaatttaaatgtaggtttattttttcgttgtttgtagagtttatttaataagagtgagatttggtataaagaaaatgatattttattttaaagttattttaggggaggaagtattggttttttgttttaagggtattattttatttttggagtagaaagagggtgtttttgaaatggggtatggaatgttggtatgaatggtacgaggggaggaagcgagtggttggggggtttgtatattatttttagtgttttatttattggatagtgattgttggtgttttttgtgggtaggattgggttgtaaaagtggttaaaattttttaggtaagagaaagttttgtagtaggtatattttgggttgtagataggttgttgttttttaaggtaatttttcggtgggtgagagtttttttttggagtttttaagtatatagttagatgaatttgttttatagggagtgtttgataaagaggaggtaaaaggttataattgtatttttaaagagttaaggaggaagtgaggagaagggggaaaagaagagagattttttaaaaattattaaattattttttagaaaaatggggatatttggttatagtgtgattaaggaaattttatttggtttttatttaaatttaagtagttatttgtggttagtggttgttattggatagaataatttatgagttattttatttatttttatgtttagttaaagagatatattttgtttatagtttatttaaatggtagtgatatttatttgaaataagaataatttatagttgttaggtttgagttattagtttattagttttatttatttttggaatatttagtgatgatttatagttatagaaagagggtttgtaattttttaaggagtttattttgttcgttgtttagatagagttggtttattaagattgggtaattagaatggagaaagagtaatttatatatagttagttgtgtaggagaacggaattttattattatttaaattagtttttttaagtattcggggattagagtttttaaggataatttggttggggaagttagtgagttacgagttttgatggtcggggatgaaattataaggagttaaagttgtttttttgttttgagtttttgggtggggggcgttgtaagattagatgagttagtttattaatttgagtggtattagttgatttattaagtgtaggggttattaaatat

SEQ ID NO: 33 - DNA, 5001 bp, Artificial Sequence
  chemically treated genomic DNA (Homo sapiens)
aagtttaaaagataattgttttagtatttaatttaaaaaatataaattagttagatatagtggtgtgtatttgtagtcggagttatttaggagattgagataagaggattatttgagtttaagggtttgagattagtttgggtaatagcgagatttagtttaaaaaaagaaaaaaaaacgttaataataataaaaaaatttattcgtttattaaattatttgtaaggcgtttgaatgaaaggtgttttttttattgtggttttgtttagggtatttatagttgtaggtgagttaatttgtttggttttgttttttttaggtttgtttttttatgatttatttgtgtgagaaaattatttttacgttgtttttttggaggaagtttaatggatttaattagttgatgtcgttgtagtagtttgtgtacgacgtgtaggattagttgaattttttggttagcgaggaggattttaggcgtattgtttagtagttttatagtataggcgaggtgagtttttgggagtttaggtagggggtcgtgagaggtgttagggatttagtttgttttaaattttagtttttggaagtggtgtgagtttggggaagtagtgtggaaatggtttagttaatttataatatttttatacgtgtgataaatatagttttaagtgacgttttgaattgtagttttcggtttattttaggagttgttattttgttttgtcgtgttttgtttttatttttagagtttgttagtttgggagtgtagtgtttattgttttgggtgattgggtttttttttattttttttgggtattaggaatttaatttgttatttttggtagtttttaggatggtttttttgtattagcgtggagttattagttttatatagattttttgggtgggaaaatagttgagaaaaggtagtgaggtgtttttgtggaggtaatgtttggagatataaagatagagaattttggtgtatagatatatagagtaattataattaaagatgtatattaaaaaattttagtaagtaatgtttagtagaaatgattgagaatgggaggttttgttttggttttgtgatattgagtattagggcgcggtttggaaattttgttttaatggtattatatgtttgttttaggaacgggggtagtgttttcgtgtttttttattatgtgaaattgggagtttatatgaattagtgtgggttaagaagagcggttttgaatattgtaattaaaagtagttttgagattattaaaagttagatgtttatttttttaattttaggtgttaggtttggttttatagttagtttgtatgagttatataaattttttgaaattaaatttgaatttataagttagtgattttgaaaattggagtcgtcgggtagtaattttattagtttttaaatttttagttaaatggttagagaatttgttaatttatttaggaatattttaaagtgattgaatttaaggaagaatataggtgaaggattatattttagatgataagatattgttggatgtaaaaaatgtgttaattttaattttaaatttttttggtataggagttttttgttttttagtagtagattagtaattttttagattatattatatagttttttttatttgttattatatttttgtttgtttttgagagtttagtaagtaaatgaagatgtaaagaaggagggtaattaggtagtaggaattatattgtgtggttcgattttgattggtttcgggttttttttagatttgtttttcgtatttaatttgtagatttttagaattttttagtggtttttttgattttgttttttggtttagggttttatattacgtttagttgattgttttagttttttgtttttttttattatgggatagtttcgttttttttgagtttgaggcgatgagtagtgtttaggattaaattgtaaatggtattttagtaaatgttgtattaggaattagattaatattggttttgttttttagaatttttaatttaggtttaattttgaatagatttttagatagggggtattttttaggtttaagttagattgtggtaggaaattattgtgtggtttcggtggggttagagtttttaagtgagggagtttagggcgatggttattttttaagaaaggaagtagaatttttttataaagggaaagttttttttgttttttgttattttttttttttttttttttatttttttaagaaataaatataattaaaaagttaaagtttttttgggttattatttttggttttatttttttttttttttttcggaggttaattattattatggtagtatatttttttaggttttttttatgtgtgtgtgttaaatatttatataatggtataataatagaatgttttgatttttttttgaaaatgtttttaagtttttagagaagttgtaaggatagtattatgaatttttatataggttatatttatttatttttttaattaattaattaatttttttttttttttttttgagatagagttttattttgttgttaaggttggagtgtagtggtataatttcggtttattgtagttttcgttttttgggtttaagtgattttgttttagtttatagatataagttattatatttaattaaattttgtatttttagaagagatagggttttattatgttggttaggttggttttaaatttttgattttaagtgatttattcgtttcggttttttaaagtgttgggattataggtatgagttacggtgtttagtttattatatttaagttgattagttgttgatattttgttatatttgttcgattttttttttttttatttatttatttatttattttgtagatatgatgatattttttttttaaataatttagtttatattttttaaggagaaggatatttttttatataatttaatataattgatgattttagaaatataatattaatatagtattatgattgaatatattatttttatataagggtttgttattggttttaataattttttttaaagttatttttatttatgtatttattttgggatttagaatttagtttaaaattatttattgtatttggttgttattttttatttttttttttttttttatttcgttggtttttttgaagattttaggggagttgttttttagaatttttattttgatatttttaagttgtttttttttattcggtgtttggtttttgagacgtatttacgtggaatggttttgggttattttttagagtatttgtttagtttttgttgtcggtattaggttttttagtgttttaagtggttggtgtatttggttagggttttgtttttaagcgtgattttttgttgttttttcgtagattaatattatgtaaagtgaaatagtttaggacgtgttgtttttggattttcgttggttttgtataaacgttttggggaagttgttgttcgtggagattttacgggcgttgtattattatcggggtcgttatatcgtggaggatatttagcgtttggtgttcgatagcgacgtggaggagttgttgtagattttcgatgttatggatatttgcgttcgggatttgagtagcgggattatggtggacgttttagttttgattaagatagataatttgtatcgtttttgggttgatgaggaggacgaggtgatggtgtatggtggcgtgcgtatcgtgttcgtggaatattttattttttttttatgtggtattttttataaggtttaggtgaatttgtgtcggtggatttattagtaaagtatagagggcgacgcggatattcgtttgtgggtgaatggttgtaagttggttaatcgtggggtcgagttgttggtgttgttggttaattacggttagggtattgaggtttaggttcgcggtttggagacggagaagattaagtgttgtttgttgttggattcggtgtgtagtattattgagaacgttatggttattacgttgttagggtttttgatcgtgaagtattatttgagtttttagtagttgcgggagtattatgagttcgttatgatttattagttacgggatttttttcgggtatagattttgaaggaaattttattgattaatattatgggggggtataaggaaagttttagtagtattatgtgtttcgggtgttacgacgtttatttataggttagtttcggtatggatatttatgtattagatttgaatttttttattcggaggaaattgagtcgtttgttggattcgttcgattttttggggaaggattggtgttttttcgttatgaatttaggtttttttgatttcgtggtaaagtataatattagtaacggggtttttaaggattttttttttagttttttttacgttttgttgcgggaatggattatttattttgagagtatagtgggtatttttatgtttaaattgagggagttgggtcgtcgggatgtcgtagattttttgttgaaggtattttttgtgtttaaaattaatttggatggtaatggttaggaggtttatgtttcgagttgtaatagcggtattttttataattttattagttttgttgtatttcggtgagggtagtttttggtttgggtagggtttgtttggattgtagaagtaagggggtgatgtagtttatttttttttttggagatgttgagggtgtttttttttgtatttatagttagggggatgttattttttttttcggtttgatttgtttttttgtcgttattttttttttcgttttatttcgttgtttgtggatggttattgtagtttaagagtagaatagattttttattttggtcgtttgaaaagttagtgtatttttttttagtgttttggattttattttttattttttagtattttgttttttattgataattttgttggaatttttaattttttaatgatattt

SEQ ID NO: 34 - DNA, 5001 bp, Artificial Sequence
  chemically treated genomic DNA (Homo sapiens)
aaatgttattgaaaagttaggaattttagtaaaattattagtaagaagtaaggtattggaggatgagagatggagtttaaaatattgagaggaggtatattagttttttaagcggttaaagtaaaagatttgttttgtttttaaattgtaatgattatttatagataacggaatgagacggggagggaggtagcggtagagaaataggttaagtcggagggaggagtggtatttttttggttgtgggtgtaggaagaaatatttttagtatttttaaagggaaggatgggttatattatttttttgtttttgtagtttaaatagattttgtttaagttagaggttgtttttatcgggatataatagagttaatggaattgtaagaggtgtcgttgttgtagttcgaggtataggttttttggttattgttatttaggttgattttgaatatagaggatgtttttagtaaaaagtttgcggtatttcggcgatttagtttttttagtttggatatgagggtgtttattgtgtttttagggtaggtggtttattttcgtagtagggcgtggagggggttggggaggaaatttttgggagtttcgttattggtgttgtattttgttacgaggttagggaggtttaagtttatggcgagaaggtattagtttttttttagggggtcgggcgggtttagtaggcgatttagtttttttcgagtgaggaggtttaggtttgatgtatggatgtttatgtcgaggttggtttgtgagtagacgtcgtgatattcgaagtatatgatgttgttgaagttttttttgtatttttttatggtgttggttagtgaggttttttttagagtttgtgttcggaagaagtttcgtggttggtagattatgacgggtttatggtgttttcgtagttgttgggggtttaggtaatgttttacggttaggagttttggtagcgtggtggttatgacgtttttaatggtgttgtatatcgagtttagtagtaggtagtatttgatttttttcgtttttaggtcgcggatttggattttaatgttttggtcgtggttgattagtagtattagtagttcggttttacggttggttagtttgtagttatttatttataggcggatgttcgcgtcgttttttgtgttttgttggtggatttatcggtataggtttatttggattttgtgaaagatgttatatgggaagggggtgaggtgttttacgggtacgatgcgtacgttattatatattattatttcgttttttttattagtttaggagcggtgtaggttgtttgttttgattagggttgggacgtttattatggtttcgttgtttaggtttcgggcgtagatgtttatggtatcgaggatttgtagtagtttttttacgtcgttgtcgggtattaggcgttggatgttttttacggtgtagcggtttcggtagtggtgtagcgttcgtggggtttttacggatagtaatttttttaggacgtttgtgtagagttagcgggggtttaggagtagtacgttttgaattgttttattttgtatgatgttgatttgcggggggataatagaaagttacgtttagggatagagttttggttaggtgtattagttatttagagtattaaagggtttgatgtcggtaatagaggttgagtagatgttttaaggagtgatttaaggttattttacgtggatgcgttttaaaaattaaatatcgagtggagaaaagtagtttgaaaatgttagaatagagattttgaaaaataatttttttgaagtttttaaaaaggttagcgaaatgaaagaagaaaaaaaaatgggagatggtaattaaatgtaatgagtgattttagattggattttgaattttaaaataagtatataaataaaaatagttttaaaagaaattattgggattagtggtaaatttttgtatgaggatgatatatttaattatagtattatattaatgttatgtttttggaattattaattatattgggttatgtgggaaaatatttttttttttaggagatataggttaaattatttagggaagaaatgttattatgtttgtaaaataaataagtaaataaatagaaaggaaaggaatcgagtaaatgtagtaaaatgttaataattgattagtttaaatgtagtaggttgggtatcgtgatttatgtttgtaattttagtattttgggaggtcgaggcgggtggattatttgaggttaggagtttgagattagtttggttaatatggtaaaattttgttttttttaaaaatataaaatttagttgggtgtgatggtttgtgtttgtaggttgaggtagaattatttgaatttaggaggcggaggttgtagtgagtcgagattgtgttattgtattttagttttggtaatagagtgagattttattttaaaaaaaaaaaaaaaaaaattaattaattaattaaaaaaataaataaatgtagtttatatgagagtttatggtattatttttgtaatttttttaaaggtttgagaatatttttaaaaaagagttagaatattttattattatattattatgtgaatgtttaatatatatatatagaaaaggtttgaaaggatatgttgttatgataatagttggttttcgagaaggggagagaggagtgagattagagatgatggtttaaggggattttagttttttggttgtgtttattttttaaaaaaataaaaagaaaggaaaaaaaagtgataaaaaatagaaggaattttttttttatggaagagttttgtttttttttttggagagtggttatcgttttggatttttttatttggaggttttgattttatcgggattatatagtaattttttgttatagtttggtttaaatttaaaagatgttttttgtttaagagtttatttagaattgaatttaggttgaaaattttggagggtagagttaatattgatttagtttttgatatagtatttgttggaatattatttgtagtttggttttaaatattgtttatcgttttaggtttaggaaagacgaaattgttttatagtggaggagaatagggagttaagatagttagttaaacgtagtgtgggattttgggttagaaaatagagttagaagggttattggggagttttgaagatttgtaaattagatacggaaggtaggtttggaggaggttcggggttaattaaagtcgggttatataatgtagtttttgttgtttaattattttttttttttatatttttatttatttattaaatttttaagggtaagtagggatgtaatgataaataaaggagattatatgatatgatttagaaagttgttggtttattattagaaagtaagggatttttgtgttaaaggagtttagaattagaattgatatattttttatatttagtagtattttgttatttaagatgtggttttttatttgtgtttttttttggatttaattattttaaagtatttttggatgagttggtagattttttggttatttaattgggagtttaaaggttgatgaaattattgttcggcgattttagtttttaaggttattggtttgtggatttaggtttagttttaagaaatttgtatgatttatataaattggttatagggttagatttggtatttgagattggggaggtaagtatttggtttttaataattttagagttgtttttagttgtaatatttagaatcgttttttttggtttatattagtttatgtaggtttttaattttatatggtggagaaatacgaaggtattgttttcgtttttgggataggtatatgatgttattagaatagggtttttaaatcgcgttttggtgtttaatgttatagaattagagtaaagttttttatttttaattatttttgttgggtattgtttgttagagttttttaatgtgtatttttaattatgattattttgtgtatttgtgtattagagttttttgtttttgtatttttagatattgtttttataaggatattttattgtttttttttaattgtttttttatttaggagatttgtgtggagttgatgattttacgttgatataaagaagttattttgaaggttgttaggagtagtagattaagtttttggtgtttagggggagtgaagagagatttagttatttagggtagtgggtattgtatttttaaattaatagattttggaaataaaagtaaaatacgataagataaaatgatagtttttaaggtgagtcgagaattgtagtttagagcgttatttgaggttgtgtttgttatacgtgtggaaatgttgtaggttagttggattatttttatattgtttttttaggtttatattatttttaagagttggaatttgggataggttgagtttttggtattttttacggttttttgtttgggtttttaggggtttatttcgtttgtgttgtggagttgttgagtaatgcgtttgaggtttttttcgttggttagggggtttagttggttttgtacgtcgtatataaattgttgtagcgatattagttggttgggtttattgagttttttttaggaaggtagcgtggagatgatttttttatataggtgagttatgggaggatagatttagagggggtagggttagataggttaatttatttgtagttgtgggtgttttgagtagagttatagtggaaaggatattttttatttaggcgttttgtaggtgatttgatgaacgagtgggtttttttgttgttgttgacgtttttttttttttttttagattgggtttcgttattgtttaggttggttttaaatttttgggtttaagtaatttttttgttttagttttttgagtagtttcgattataagtatatattattgtgtttggttagtttgtgttttttgggttgagtattggggtagttgttttttagattt

SEQ ID NO: 35 - DNA, 6274 bp, Artificial Sequence
  chemically treated genomic DNA (Homo sapiens)
ggattatttgagtttgggaagttgaggttgtagtgagttaaggttacgttattgtattttggattgggtaatagagttagattttgttttaaaaaaaagaaaaattttatggttttgtttatattatttatttgattttatatgttgtttattttttttattaaaatttttagtttattaattatagtttttttataattaatatttcgatgtgataatgttttagtttaattattgtggttataatagaatgttataaattgggtgatttataaataaaagaagttgatttaggttgatttagaggttggggagtttaagagtttggtgttagtatttgatgagtgtttttttgttttattataatatgggagagggtattacgtgtgaagagagtttatttttataatatagttatttttataagaattaatttatcgttatgagagttatgtgaatttatttatgaggatagcgggttaagtttttaatatatggatttttcggggatatatttaaattatagtagttagttgtaacgttcgtgttatgttttattttggttttgatgtttgtgtagtttttttaaattgcgtttttgttttttagtgtgttttgtaatgtggaaatgatatattgggtaagaggagttgtagtaaagaggtttttagtgacgtagtgataagttgtggggagagggagtgttgtatagttttgtcgtatgttatagttttttagtgagtttgtgtttttggattgtgaattttatgtttgttttttagtttttttagttttttagatggtatagaattgttggaggggggtggagttgtatattttttttgttttgggtaggttattttttgataaaatattaggttaggtttttggtgaaataattttttttgagggtagattttttattaataatagaatgttttaatttattttaaaatggttttttttttttttttattgttagaagtataatgagattttttttttaatattcgtggtaaggatttagtagagttttaggaggtaatatttttaagtgttttatattattttgtattatgattgggttttgttggagtttttaatttgtagaattgtttatattgagtttttcgtaattttttaattatagggtaaatttttttagtcggtattgggtttttggaggtttttgtttgttggtttttttttttggaggttgtgtttttgtgtttgtttgtttttttaatttggggggtagtggtttgtttaatgattttaattttttgaaagagttaagaagaggtgttaatttttcggtttgtttagttttttatttgttgttagaatggagcgttaatagtgttttttatagtgatatgtaatttttaattttagagatgatgaagtatattaatgataaaggagaaatgttttagtagttttttgttagtatattattttttgaaaaagttgttttttttatattttgtaagagatgggttttaatttagagtttaaggtaaatgattttttttaaggagaaggaataaatagttttagaaattatgaaagtttgtttttaggagtgtttttgaattttagtaggggttatatttattttgtagaaataggtgaggtatgtttttggtataaaattttaatggtatagaaggataaattgaaaaataagtttttttttaaatttttgatttcgagttatttagtttttttttttagaggtaaagttgttattagatttttgtatttttttaatatatatttttagaagagttgttaagtgaatatatgtttaagtgaaaatttattttagaagtgtatttttttaaggaattttagggttggaaggaatttgtgttagtttttaatttataatttttattagtatttattgtttttgtataaaaattttttttaaaaaagttttttttattttgatatagtttattttatttttatttagttttaataatttataaaatatatttttgaaagtttaaaatttgttattatgttttttttttttaattaatttttattttgatttttaagttagagaaaataggtggttaaatgttttttgtttaagatggaatttagaatatttgaagattttagatttttattttgttaaataacgtgttttttttttttttttatagagtatttggttttaggaaatttagagttatattttttatagataagattaaatttttatttaatatatttagaaattttttttaagaggataattatttattagaggaaaaaagttttttatgtatagttggtaaagggatggaattatttgtgttattaaaattgatagacgtttatgagatttattaagggaaatattagagttttagtatatatttgttaatatagtatatatgaaggttttatttataatttttttggttaagtagaaattttggtattatttattttaataaatttttaagatattatgaaatagaattttaggttttgatattattatttgttttaggttttgaagcgttgttggataagaggggtaaaatacggttttgttttggatttaaagttggttttttatattagtaagtatattttggtattttggttatttttttcggttatagtattatattgttataaaaggtagatataagtattaattagtttataggttattagataagtttagtttgattaatgtttaatatagtaattgggttattattgttatttttgtggtggtggtatatatatttagtttttgttcgggttatggtttaggattattttttatagaggttgtgagttagagttttaattgtgtagggttttaattatgttaggttatttattttttttaagaggattttattagtgtttgttcggttatatagttttttatttattaagtaatatagttattagtatattttaggtattagttaaggattataaaattaacgtgaatgttagtttttgtattaaaagtttaaaggagaaatttaaattttatatagatgttttatgaagatgtttagtaaatttatttttttttgttttttggaatttattttagtattgtgttatgtgtgtgtttagtaattttttataaaaagttttgttttttgtgatgttattagattatattgaagaatatataagtcgtattatgaaggttgttgttttatatagttttaacgtagtgagaattgatgtttttatatgttgtttttttgggtatttaaagaaatttttgtatagttttataaattagttgtagtttaaattgatttgtgttgtgatttgtatatataggttatatttttttgatagaaaatatagtttaaaattaaatttgtagtttttgttaagtgaatgtataggattttattgtatttaggttttttattgtaagatttatttttgtttttattttatgttttattgttgtgttttttatttgtttttttttagttttgttttttgtgtttttacggattgtttttagtttaggtgtgtaggaagtatatatatgtttgtagagtttttatggtttttgtatttagggtatgattttaacgtatagtggttgtattgatttgttaaaataaaggaatagattattttttttaatttatagggaagttttaggttgtgcgggtagtgagtagatttgtgtttgtttgcgtttgttttggtgaaaaattttatcgtttaggttgtagggtgcgagatttaggtataaatattttgttggatgaggaggaaagatgtaaggttgtttttttttagagatagtaaagggtaggtttgtagttttatttattttaggattgtgatttttgatagagtcgagagattagggttgttgaattaggtttgaaggttttagtgaatttcgtgaagagaggaggggtttggttgtaatatggatttagaggatatttttattgtaggagaaggaatagtggggatggggtggatttgttaaaggaatatagtttaagtttttgtagtttaaaaaagtttagttttttttggttaaagttttcgcgagtttttttggtattttttttgcgggagttataggggtagtgggatatttagtttttttaaaagtatttttacggttgtttgtgttaagtttttattttaagagttttatttttgcgaagtaatgtgttttatatattggttttaaagtatttatggttggttgtaataaatattaaggaggtttgtttttgtattcggagttgggtgtttttattttagatgatttcgagggtgtttgataagatttgaaggattttcggattttagagtattatttcggacgtttggtatttttgtcgcgcgggtacggcgatttttttagttgttaggttagtttttgattttcgagagggtttcgtagtgttgtaggggaggtggggattcgaataaaggagtagttttttcgtcggtgttattattcgacgttggttttaaggttcggttagtttgtttaaagttggtataagtttgttttgtaaaataaaagaagggaaagggggaaggggattttggtatagatttggttcgatttggatataggttgggtttgtaagttcgcggggatcgggtttagaggggtagtgttgggaacgtttttttcggaaattaattttttagggtattcgttttttttttatgcgtcgttttattttcgtcggagattaggtttcgcgggggttatcgttgtttatcgttttcggcggtcgttggttttgggttttcgttgttggtttttttttttttttttcgtatttttttttttttttgtttttttcgatttttttttcgtcgtttggtttttttttttttcgttttgttttttcgcgtttcggttcgcgcgagttagacgttcgggtagttttcggcgtagcgcggtcgtagtagttttcgtttttcgtacggtgtgagcgttcgacgcggtcgaggcggtcggagtttcgagttagtttcggcggtcgtcgtcgtttagatcggacgataggttatttcgtcggcgttcgttcgagttttcgtttcgtcgttaacgttataattatcgcgtacggttttttgatttcgtttagtattgatcgggagagtcggagcgagtttttcggggagtagcgatgcgatttttcgggacggtcggggtagcgtttttggcgttgttggttgcgttttgttcggcgagtcgggttttggaggaaaagaaaggtaagggcgtgtttcgtcggttttcgcgtcgttttcggatcgcgtttcggatttcgtagttcgtttaatcgcgtatcggcgtatcggttcggcgttcgcgttttcgttcgtttttttttgtttttttgagattagttgcgtcgtcgatcgggatcgcgggaggaacgggacgtttcgtttttcggtcgggagagtttggggcgggcggaggaggagacgcgtgggatatcgggttgtaggttaggcggggaacggtcgtcgggattttcggcgtttcgaatcgtttttaattttttttttttatttttttcgtttagttgcgtaggatcggcgttagtgggcgaaagtcgggtgttggtgggcgtttggggtcggggtttcgtacgtgcgtttcgcgttgtttttttagggcgcgacggggttttggcgcgtattcgaggggcgggcgttgtttattcgtcgagattgtattgtttagggaagttgaggaaggaatttaaaaatatagttttttttcggatttcgcgggataggcggttttttgagaggattttttcgttttcgtttttcgcgtaggttttaaattgaagtcggcgttcgttagtttggtttcggtttttttttaggttttcgcgattttcgttttttagtgtggagtcgtagtttcgatttgggagttgggagaattcgtttattattatttgcggttttcggggaggggtggtgttggcggcggttagttttttcgttggtaaaaggtaggtggggttcgattcgttttttgggcgtagatttcggtcgttcgtttcgttcggtgcgttttcgttttgtttatttaagagtgttttttatttttcggggattttagtttttttttgggcgttcgcgtcgaaagttttaggttttttttcgatggtcgtttcgcggagacgttcgggtttgttttatttgtagtttttcggtcgcgtttgggtttcgcggtggagcgggacgcggttgt

SEQ ID NO: 36 - DNA, 6274 bp, Artificial Sequence
  chemically treated genomic DNA (Homo sapiens)
atagtcgcgtttcgttttatcgcgaagtttaggcgcgatcgaagggttgtaggtggagtagattcggacgttttcgcgaggcggttatcgaaggagagtttggggttttcggcgcgggcgtttaggagggagttggggttttcgggaggtggggggtatttttggataggtaagacgagggcgtatcgggcgaggcgagcggtcggggtttgcgtttaaggggcgggtcggattttatttgttttttgttaacgaggaaattaatcgtcgttagtattattttttttcgggagtcgtaggtggtggtagacgagtttttttagtttttaggtcgaggttgcgattttatattggggaacgaggatcgcggggatttggagaggggtcggggttaggttggcgggcgtcggttttagtttgagatttgcgcggagggcggaggcggggaggtttttttagaaagtcgtttgtttcgcggggttcgaggggaggttgtatttttgggttttttttttagtttttttaaatagtgtagtttcggcgggtgggtagcgttcgtttttcgggtgcgcgttaggatttcgtcgcgttttgggaagatagcgcggggcgtacgtgcgggatttcggttttaggcgtttattagtattcggttttcgtttattgacgtcgattttgcgtagttgggcggggaaagtgagggaagaaagttgggagcggttcggggcgtcggaggtttcggcggtcgtttttcgtttggtttgtagttcggtgttttacgcgttttttttttcgttcgttttagattttttcggtcgaagaacgaaacgtttcgtttttttcgcggtttcggtcggcggcgtagttgattttaaggaaataggaaaggacgggcgggggcgcgggcgtcgagtcggtgcgtcggtgcgcggttgggcgggttgcggggttcggggcgcgattcgggggcggcgcgggagtcggcgagatacgtttttatttttttttttttttagagttcgattcgtcgggtagagcgtagttagtagcgttaggagcgttgtttcggtcgtttcggagggtcgtatcgttgtttttcgaagagttcgtttcggttttttcgattaatattggacggagttagggggtcgtgcgcggtggttgtggcgttggcggcgaggcggggattcgggcggacgtcgacgaggtggtttgtcgttcggtttgggcggcggcggtcgtcggggttagttcgggatttcggtcgtttcggtcgcgtcgggcgtttatatcgtgcggggggcggaggttgttgcggtcgcgttgcgtcgggggttgttcggacgtttagttcgcgcgggtcgaggcgcggggaggtagggcgggaggaggagggattaggcggcggaggagggatcgggaggagtagaggaggaggagaatgcgaggaggagggaggagaattagtagcggggatttaaggttagcggtcgtcggaggcggtggatagcggtggttttcgcgggatttagttttcggcgggagtggggcggcgtatgggaggggagcgggtgttttgaggagttaattttcgagaggggcgtttttagtattgtttttttggattcggttttcgcggatttgtaggtttagtttatgtttaggtcgagttaaatttgtgttagggtttttttttttttttttttttttttgttttataaagtaaatttgtattagttttagatagattggtcgagttttagagttagcgtcggataatggtatcgacggggaaattgtttttttattcgggtttttattttttttgtagtattacgggattttttcggggattagaggttggtttggtagttgaggaggtcgtcgtgttcgcgcggtaggggtgttaggcgttcgaggtggtgttttaaagttcgagggttttttagattttgttaagtattttcgaaattatttgaaatgagggtatttaatttcgggtgtagagataggtttttttaatgtttattgtaattagttatgggtattttgaagttaatgtgtgaagtatattatttcgtaaaagtgaagtttttggaataaaggtttgatataaatagtcgtggaggtgtttttagagaggttaagtgttttattgtttttgtagttttcgtaggagaaatgttagggaaattcgcggaagttttggttaaaagaaattgagtttttttgggttgtaggaatttgagttatatttttttggtaagtttattttatttttattgtttttttttttgtagtaaaaatgttttttaggtttatgttatagttagattttttttttttttacgagatttattaggatttttaggtttggtttaataattttgatttttcggttttgttaaaaattataattttgaagtaagtgaagttatagatttgttttttgttgtttttgaaggggagtaattttatattttttttttttatttagtaaaatgtttgtgtttgggtttcgtattttgtagtttgaacggtggggttttttattagggtaagcgtagatagatataggtttgtttattgttcgtataatttggaatttttttgtgaattaggagaagtaatttgtttttttgttttaataaattagtatagttattgtgcgttgaagttatgttttgaatgtagaggttatgaaggttttgtaggtatgtgtgtgttttttgtatatttgggttgagagtagttcgtagaaatatagaaaataaaattagagaaaggtaaatgggaagtataatagtggaatataaaatgaagataggagtgagttttataataaaagatttgaatataataaagttttgtgtatttatttaataagggttgtaaatttggttttaaattatattttttgttaagggaatgtgatttgtgtgtataagttataatataaattaatttaagttataattgatttgtaagattgtataggaatttttttgagtgtttaaaaagatagtatgtaagaatattagtttttattacgttaggattatatgagataatagtttttatagtacggtttgtatattttttaatgtgatttgatagtattataagaaatagagttttttgtaaagaattattagatatatatatagtataatattgggatggattttagggaatagagaagaatgggtttgttgaatatttttatgggatatttatgtaaagtttgagttttttttttgagtttttgatataaaagttgatatttacgttgattttgtagtttttggttagtatttggagtgtgttgataattgtgttatttggtaagtaaaaaattgtatggtcgagtaggtattaatgaagtttttttaagagagataagtagtttggtatagttagggttttgtatagttagggttttagtttatagtttttgtggagggtggttttagattatggttcggatagaggttgggtgtgtgtgttattattataggaatgataatagtggtttagttgttgtgttaagtattggttagattaagtttatttgataatttgtgagttggttaatatttgtatttgttttttatagtaatgtgatgttgtggtcgggagaagtgattaggatattaaggtatatttgttagtatgagaggttaattttgaatttaaggtagagtcgtgttttattttttttgtttagtaacgttttaaaatttgagataaatggtgatgttaggatttaaaattttattttataatgttttggaaatttgttagggtgagtaatattaaaatttttgtttggttaaaaaaattatagataaagtttttatgtatgttatattagtaagtatgtattaagattttagtattttttttaataaattttataagcgtttgttaattttaataatatagatggttttatttttttgttagttgtatatgagaaattttttttttttgatgagtggttatttttttagaagaagtttttgagtatgttgaataagagtttagttttgtttataaggaatgtggttttgaattttttaaaattaaatgttttgtgaaaggggaggagaaatacgttatttggtagggtgaagatttgaggtttttaaatattttaagttttattttaggtaaaaggtatttgattatttgttttttttggtttagaggttaaagtaaagattgattaggaaaaaaaaatatagtggtagattttagatttttaaaaatatgttttataagttattggagttaagtaaaagtagaataagttatgttagagtggaaagggtttttttgagaaagatttttgtgtaagaataataagtattaatggaggttgtgaattaaggattgatataggttttttttaattttaaagttttttaagaaaatgtatttttaaaataggtttttatttaaatatgtgtttatttgatagtttttttaaggatatatgttaaggagatataagaatttggtaatagttttgtttttagggaggagaattaggtagttcggggttaggggtttagagggagatttgttttttaatttgtttttttgtattattgggattttgtattaggagtatgttttatttatttttgtaaggtaagtgtggtttttgttgaggtttagggatatttttgggggtaggtttttatggtttttgagattgtttattttttttttttgaaggaagttatttgttttgagttttgagttgagatttattttttgtagaatgtggaagaagtagtttttttaaggggtaatgtgttgatagaaaattgttgaagtattttttttttgttattagtatgttttattatttttagagttgagggttatatgttattataggaggtattattggcgttttattttagtaataagtagaaagttgagtaaatcgaaaaattaatatttttttttagtttttttagagaattgaggttattgggtaaattattgttttttaaattggagagataggtaaatatagaagtataatttttagaggaagaaattagtagatagaaatttttaaggatttagtgtcggttgggaaagtttgttttgtaattgagaaattgcgggaggtttagtgtgggtagttttgtaaattaagaattttagtagagtttagttatggtgtagggtagtatgagatatttgagagtgttattttttggagttttgttaggtttttattacgaatattagggggaaaattttattatgtttttggtagtggaaggagaagaggaattattttgaaataggttggaatattttattattaatagaaggtttgtttttaggagaaattattttattagaggtttaatttggtgttttattagagggtgatttatttagagtaagggaaatatataattttatttttttttaatagttttgtattatttaaggggttggggaagttgagaagtaagtatgaagtttatagtttagggatataggtttattggaagattgtgatatgcggtaggattgtgtaatattttttttttttatagtttgttattacgttattagaagtttttttattatagttttttttatttagtatattatttttatattgtaaggtatattaaaaggtaaagacgtagtttgaagagattgtataagtattagaattagaatgagatatgatacgaacgttataattaattgttgtggtttgaatgtgttttcgaaaagtttatatattggaaatttaattcgttgtttttatgaatgaatttatatggtttttatggcggtgggttaatttttgtgggagtggttatgttataagagtaagttttttttatacgtgatgtttttttttatgttatgatgaagtaagaagatatttattagatgttagtattaagtttttggattttttagtttttaaattagtttaaattagttttttttgtttataaattatttagtttgtggtattttgttataattatagtaattggattaagatattattatatcggagtattaattataaaaaaattatgattaataggttaggagttttaatggaaaaaataggtaatatgtaagattagatggataatgtaagtagagttatggaattttttttttttttgagatagggtttggttttgttgtttaatttagagtgtagtggcgtgattttggtttattgtaattttaattttttaggtttaggtgattt

SEQ ID NO: 37 - DNA, 3720 bp, Artificial Sequence
  chemically treated genomic DNA (Homo sapiens)
tgtagttgtttattaaaattttatatatattttggtatataattatattcgttggaatttattttatagatatatttatatttatatagttaaggatgttgattttaataatattggtataagtaaaaagttggaaattgtttatatgtttatggataggggataaatcgattaatttaaggtttttttttataatggagtattatatagttttgaaaaagaatgataagatttttatgttaggatatggtataatttttaagttattttaagtgaaaaaataataataataataatattgtagaataatgtgtatggttggatatatataaatttttttgaaagaatatttaagaaatttaaatgtggttattttaggagttaggaatgaggtaggtggagaggagggatttttattttttaatttagaatatattttgttgtgttagttgattttttttttattgttaataagtattatagttttttttaatttaaattattttttttagtataaatttaaaaaaaaaaaatttaaaatggaaaaatatataggcgtgagtaaaagaaatgaatggtaataatttttgtggtttattgagtgcgtttggatatttatgtgtttttagtttttttttataggaaatgtataggtgagaaattgacgttaagggggattgagtgttaagttagttagtggtagagggtagatttaaatttaatacggtttttttttgttgtttttcggtttttgtttttaggtgggaagcgtatttatcggacggtcggttcggtgaggcgtagcgttttagattggcgtattcgcggttttagcgttttacgtttggggagcgcgcgcgtacgtagcggcgcgagtttggcggcggcggcgataataataacgttatagttcgagttttttttttcggagttttcggtatatattttgtgtttatgtttgggtatttacgttacggcggtagggtcggggttttttaaaatggtagtggttcggggagtcggaagttcggagttagcgtcgtcgtagttatataagtgggggggttgtgggttgggggagttcggtagcgttttggagaggcgaggagtcgtcgttcgaggtcggtgcgggcgagcgagggcgtcgcggtttttcgattttttttttagaggtgagtgttcgaagttaggagttcggcgtttataggtttgtgcgttgcggggaatttttatcgttagttttttcgttattcgcgcgtttttaagtttagcgggcgaggtttcgggcgttttatagtcggcgtcgcgttatgttttattttagcgagtttttcgaattcgacgcgtttttcgttaagtttattgaaggttgttgcgtcgaatttagcgttgaattgtttcggttgtttgttagggacgttttcgcggttatcggttattttggaggtaaggagggcgagtaggggtgtttagacgacgacggcgtagcgcgggggcgtattatatttgagaattaggagggattgggatattggagttatgagaataggggcgatgggaagtttaggagttttggggtgcgtatttttatttttatttatattgggtcgttagcgttttcgtaggaatttgtgcggttatcggagcgtttttttgtttgtgtacgtgtgttttgcgtgtgtatgtttttatgtgttttttgggacgtatgcgggtttttgttgaattagaatgtgtaaaaggtattttgtgtatattcgtgggtattaagagttttgtaggtaggggttgtggatttaggtgtattttttgatgtgtttagagttgatttttgttttttttttagtaggcgattttttgagttgggttttgaatagttgcggcgtaagtggggatttagtcgatttttgttttttggaggggtttgcgtttatattttttttcggttttagttatagcggtagtttttttatttaggtagtgttcgaatattcgtacgattcggaggtattttttaattttatgtcgggcgttttaggtttggtattttttttcggtttagaggtagtagcgtttagattttcgttggatgtttttttttttgcggggttcgatgttttgttgtcgggttcgtcggatttttatttttcggatttgggcgttgttttttttttagaggcgttttgggaggtttcgttttgcgcgggtgttttttcgtagtgtttgtatgagttttagtttttttcgttcgacgttaagttcggttttcggcggtttttcgtttcgttagcgttggacgttgtttttgtttttaagggtttttacgcgttttgggagttgttttttgtgggggttttagggaattgtgggttatagggagattattaggtcgtttcggaggttcgttttttcgtaatagggattaagattgaggatttgttgtttattagttgttttgcggaattgtcggtcgttttagttaatagattttattttagcggggtttatgacgttttttcgttggtttcgggtgatttaggggagggggttgagggtttttttgggtttttgattttttttagtggggagggagggagtagcggcgacggcggagagtttttggttagtacgtagttttagtttttttcgttgggttttcgtagcgtcgtcgcggcggatttttttaaatttttggtggcggatatttttggaagtagtggcgtggttgtattattcgtgtcgtcgtcgtcgtttattttttttttttaggttaaggcgcgacgtaaggggcgtcgcggcggtaaatgtagtacgcgttgtttttgttcgcggtcgtacgttaaggttttcgtttgttcggtggagagttgtgtgcggagttttgcgcgtttcgacgagtttaatcgttatttgcgtatttatacgggttataaatttttttagtgtcgtatttgttttcgtaattttagtcgtagcgattattttattagttacgtgcgtatttatatcggcgagaagttttttgtttgcgacgtgtgcggtcgtcgtttcgcgcgtagcgatgagaagaaacggtatagtaaggtgtattttaagtagaaggcgcgcgtcgaggagcggtttaagggtttcggtttttattcgttgggtttttttttcgtttttttttgagtaagagatgggtttatgggttggggcgtcgtcgttcggcgcgtacgagtttcgggtcgttttttttttcgttttttttttaattttttttcgtacgttcgagggtcggttttcgtttcgtttttagtttttttgaagcgttcgtcgtatacgttttatttagtattagttcgtcggatagttttcgcggtttaggcgttgttatttttgttagtcgcgttttgggggaagttttttgagattatttagtgaataggtattattttgggatttaagatagttttttgtaattgtatacgttttacgtttttttttataatttttagagataggttggggtaggttaaggcggtttcgcgcgggattttgtatagtagtgttttatttagtagtcgattggatgtaacgttttgttttgggttttttttttttttgttgttgttaatttttgtaaagtagacgttatttttaagtagttgataaaattgtttatttttgtaattaaaattattgtgttaaaagtttattgaatttgttatgtaagttttt

SEQ ID NO: 38 - DNA, 3720 bp, Artificial Sequence
  chemically treated genomic DNA (Homo sapiens)
aggagtttatatggtagatttagtaagtttttagtataataattttaattgtaaaaataaatagttttgttaattgtttgagagtagcgtttgttttataaaaattaataataataaaaggaaaaaaaatttaaagtaaaacgttatatttaatcggttgttggataagatattgttgtataaagtttcgcgcgagatcgttttggtttgttttagtttgtttttgggggttatagaggaaggcgtggggcgtgtgtagttataaaagattgttttgaattttagggtagtgtttatttattgggtggttttagaagattttttttaaagcgcggttgataagggtgatagcgtttggatcgcgggaattgttcggcgagttggtgttgaatagggcgtgtgcggcgggcgttttaaggaaattggaagcgggacggaggtcggttttcgggcgtgcgaggaggagttggaagaagagcggggaggggaacggttcggaattcgtgcgcgtcgaacggcggcgttttaatttataaatttattttttgtttagagagaagcgaaggagaggtttagcgagtaaaagtcgaggtttttgagtcgtttttcggcgcgcgttttttgtttgaggtgtattttgttgtgtcgtttttttttatcgttgcgcgcgaagcggcggtcgtatacgtcgtaagtaaaaggtttttcgtcggtgtgggtgcgtacgtggttggtgaggtggtcgttgcggttgaagttgcggaggtagatgcggtattggaagggtttgtggttcgtgtggatgcgtaggtggcgattgagttcgtcggagcgcgtaaagtttcgtatataattttttatcgggtaagcgaaggttttggcgtgcggtcgcgggtagaagtagcgcgtgttgtatttgtcgtcgcggcgttttttgcgtcgcgttttggtttgggggaaaggggtgggcggcggcggcggtacgggtggtgtagttacgttattgtttttagggatgttcgttattagaggtttagggaagttcgtcgcggcggcgttgcgaaggtttagcggggaaagttgaggttgcgtattggttagaaatttttcgtcgtcgtcgttattttttttttttttattaggaggggttaggagtttagggaggtttttagtttttttttttaagttattcggggttagcgggaaagcgttataggtttcgttgggatagagtttgttggttgggacggtcggtagtttcgtagggtagttgatggatagtaagtttttaattttggtttttattacgggaaaacgagttttcggggcggtttggtagtttttttgtgatttatagttttttggggtttttatagaaagtagtttttagggcgcgtagggatttttgaaggtagagatagcgtttagcgttggcgaggcgggaggtcgtcggaggtcgggtttgacgtcgggcggggagagttgaggtttatataggtattgcgagggggtattcgcgtaaggcgaggttttttagaacgtttttgggaaaggggtagcgtttagattcggggagtaaaggttcggcggattcggtagtaaggtatcggatttcgtaggaaaaggggtatttagcggggatttggacgttgttgtttttggatcggggaagggtgttaggtttaagacgttcgatatgaggttgaagagtgttttcgggtcgtgcgggtgttcgggtattgtttgaatgaagaagttatcgttgtagttgaggtcgggagggggtgtgggcgtaggtttttttaggaagtaggagtcggttaagtttttatttgcgtcgtagttgtttaaagtttagtttaagaagtcgtttgttgaggagggagtaggaattagttttgggtatattaaagggtgtatttgagtttatagtttttatttataaaatttttggtgtttacggatatatataaagtgttttttgtatattttgatttagtaggggttcgtatacgttttaaggagtatatagaaatatgtatacgtaaaatatacgtgtataggtaaaagggcgtttcgataatcgtataggtttttgcggaggcgttggcggtttagtgtgggtgggaatgggggtgcgtattttaggatttttaagttttttatcgtttttatttttatagttttaatgttttagttttttttggtttttaggtatggtgcgttttcgcgttgcgtcgtcgtcgtttgagtatttttgttcgttttttttatttttagggtagtcggtggtcgcgggagcgtttttggtaggtagtcggggtaatttagcgttgggttcggcgtaatagtttttagtggatttgacgaggagcgcgtcgggttcggaaaattcgttaaggtggagtatggcgcggcgtcggttgtggggcgttcggggtttcgttcgttgggtttgggggcgcgcgggtggcggggaggttggcggtaggggtttttcgtagcgtatagatttatgggcgtcgggtttttggtttcgggtatttatttttgggaaaggagtcggggagtcgcggcgttttcgttcgttcgtatcggtttcgggcggcggtttttcgtttttttaaagcgttgtcgggtttttttagtttatagtttttttatttatatagttgcggcggcgttggtttcgggttttcgatttttcgggttattgttattttgggaggtttcggttttgtcgtcgtgacgtaaatgtttaaatatggatataggatgtgtgtcggggatttcgaaaaggaaagttcgagttgtgacgttgttgttgtcgtcgtcgtcgttaggttcgcgtcgttgcgtgcgcgcgcgttttttaggcgtggagcgttggggtcgcggatgcgttagtttggggcgttgcgttttatcgggtcgatcgttcggtagatgcgttttttatttggaggtagaggtcgaggggtagtaggggaggatcgtgttgggtttgaatttgttttttgttattaattagtttgatatttagttttttttaacgttagttttttatttgtgtattttttgtggagagaaattgagagtatataaatgtttaggcgtatttagtaaattatagagattattgttatttattttttttgtttacgtttgtgtgtttttttattttaagttttttttttttaaatttgtgttaggaaaaataatttaaattaaaaaggattgtaatatttgttaatagtaggaggaaagttaattagtataatagggtatattttaaattgaaaagtaaaagttttttttttttatttattttatttttagtttttgaggtagttatatttaagttttttgggtatttttttagaagaatttatgtatatttaattatatatattgttttgtaatattattattattattatttttttatttgaaataatttagagattgtgttatgttttgatataaagattttgttatttttttttaaggttgtatagtattttattgtaagggaggattttgagttagtcgatttattttttatttatgagtatgtaggtagtttttaattttttatttatattaatgttgttggagttaatatttttgattatataaatgtgaatgtgtttgtgagataaattttaacgagtgtaattgtgtgttaaagtatatgtaaaattttgatagataattgta

SEQ ID NO: 39 - DNA, 14147 bp, Artificial Sequence
  chemically treated genomic DNA (Homo sapiens)
gggggtattgagtaatatatttagattaataatattttataagtgtgagtattattgatttaaatttttttgttggttgtgttttgtgtttatgtttgttttatatttattttttttagagttgttttttttagagttttagtaatttttatttttttaaatttttttagttatgggaaggattagtaggtgttagtggatttaaaagaattttagatttgttgagatttttgatttttggtgtttagattaattagtaaatagtttaattaaacggtttgtttttatggttaatataattttgaattggtggttatttagattaagtttattttgtttttgagacggaattttgtttttgtcgtttaggttggagtgtagtggtgcgattttggtttattgtaatttttgttttttgggtttaagggatttttttgttttagttttttaagtagttgggattataggtatttattattattttcgattaatttttgtatttttagtagagatagggttttgttatgttggttaggttggttttaaatttcgattttagatgatttgtttattttagtttttttaagtgttgggattgtaggtgtgagttatcgcgtttagttaaagtttagtttgtataagaaggttttttttgttatgttataggatttttgagtttattaaatagattttaatgttttgagattttacgtatttttttaaaatgaagtatttaaattgttagtgtttgtttttttgtttggtttttttgatgtattgatttggtttgttagtgtgatgaaaaatatggttgagttttattgttttattgtaattagtaggattgtttagaagtttaatttttttaagagatgaagatttgagtttatgtagttggttgttttttaaaaatatttggttatttgggatatattttgaattaattttttggttattttatgtgattaaaagtgttagttttttttgtttttagtatatttttttgtttgggaagtggaagggatgaaatttttatatttttttttgatgatatagaaaggagtatatatttatattttatgaatagatatgtaattatagaagaaatagtttaacggtcgggcgcggtggtttatatttgtaattttagtattttgggaggtcgaggtgggtggattacgaggttaggagtttaagattagtttgtttaagatagtgaaatttcgtttttattaaaaatataaaaaattagtcgggaacggtggtaggcgtttgtaattttagttatttaggaggttgaggtaggagaatcgtttgaattcggagggtggaggttgtagtgagtcgagattacgttattgtattttagtttgggcgatatagtgagattttattttaaaaaaaaaaaaaaaagtataattatatgattatttatattgttttatatattaaattagtagtaatttgttttttatatagtaaataaaaataaattagtagtaataaatatattttttttgtgttatagttagtatttggtgaattttgtattttttttttttttaaagtgttgaatttataggtttttataaggtaagtttatattattaattaattttgtttttttttttgatgttaaaattgttttttaggagttgattaggtttatttttttgttttttaagtattatttttagaatatttttgaaagtatttttgttttttggtaataatatttatattttatttattttttgtttttaaatatatatttagttaattttaggttttttttaatggagtagttatttatttatttaatatacgttgggtgttttttttgtgttatatattgttttggtttttggggatagagtaggaaataaaaaaaaataaaatttgtttttatatagttgatattttagttaggggagataaataataaataaatgaatgatgtagtatgttagatgttgatagtgttatggagaaagtatattatggagattagaagtattatttgtaatggaatagttatgattttaagaagaatggttgattggatgtgaagtgtgagagagaggagtttaggtttttggttgagtaattggagggatggagttgttattatttgagatggagaagttaggggaggagtagatttggaggggaaggttaggaatttagtttggaatttgttaagtatgaggtatttattaaatattgaagtggatttttagaagatgttattaaaattagttaagtttaggagagagttttgggttagaaataaaaatgtgggagatattggtatatatatgggtttatattatttttttttttaatttaatattttattttattgttttttgtttttttaatagtatttagttttatttattttttaaattgatttttatattgatagtataataaaatttatattttttattatattaagattttgtgtgatttaatttttttttattttttggattttgttttaggttattttttttttttatttaatttttaatattttgattttattgttttttaaatagttttttgttgttttttgttttttttgtggaaaaggtttttttattgtttaattattaggtatttttcgatttttttttattttttatttttgagaaaggttttttttgattttttatattaattaggatttttttgggcgagatttgatttaaattggtttagagaaaaggagttaattgattggtttatgtaatttaattttttttttttgttgtaatttttttttggtttttattttatttaaggttaaagttagggtttttattatggttttgtaggttttatatagtttgttttttttattatttttttgattttattttttatattttttttttatttatttttttttagttagagtggtttttttgttgtattttaaatatgttaggtatatttttattttagtgtttttgtgtttgttgttttttgtgtgtggaatatattttttatatagttatattatttaaaatttattgtttttaagtttttatttaaatgttttttcgtgaagttatttttgagttttttttaaaattgtagttttttatttttgtattttttattgttttttatttttaatttttgttattgtagttagaattatttgatatatagtttttattttattggttttttgttatgtttttttttataagaatttgaagtttattaggtcgggagttttgtttgttgtgtttgttgttattttttagtgtttaaaattgtttggtatatagtaggtatttaataatttttgaattagtgaaaattagatggtggtttggtatttttatataggaatgagttaggtggaaattatttaggatataagtagattttgaagtgataaggaagggttattataattatgtggggtttattttgtttttttttgttttttttttttaggtttagtaatagttttattaaggattttatgaatattaaagtttatatttatatgttgttagaggtgagagtagtttattttattattagattttgtgtttagggtggtgatttgaagaaggaagagagcgaaagaagggaaggattatttttttttttaaattggagttaagggagggaggttagagtaagtttgggggcgtaatttagatttagtttttgtttaattttttttgtttttttttttaggggtttagagaattataaggtttgtagaattttttagagaagttttattattgattttttttttttatttttagatattaaagagtttgaatgtttttgagttatatggtttttttttttttttataaattttgttagttgttacgggggtttgtttttagggtataaagttattgagagatttagagatttagtttttttgtggaatttttaaaatgttttagtagttttgtttttagtttgttgtttggtagtatttgttagttgattttatgtattgtttttttttttgttattttggtaatttgggttttttattttatttttttttttatttttttttttagacgttattttttgaattgttatagagaatgggttaatttatggtggaggtttgtttatttttataataattaaagggttttaaggtttacgtttttatatatttaattattttttaggtattttaaattatatttaaattttaatttagttttattttgttttagtttttgtttgtaagtgttttagtttttaatgggtatagatttggatttcgttttttttagtcgggtttttattttaggttgagtttagttatcgttaattaatgtagagttaggttttttttttttttaattttggtcgtagtttaattttgttttttgaaagtatttcgtttttgttatttaatgttttttcgtgtgtttgatagttattttgtttttttattttcgttgtgttttaaattcgtttttatttagttttatggttttgtttaatcgtagagttgttttgttcgtttacgcggagtttagttcgatttattttcgtcggttgttacgtttatttttatataagttttgttttcgttgagtagtatggcgtgcgatatcgtttttttggtgttttggtaggggtttagaagtttttcgttcgttaattagagaaaaatagggttatttattttcgtttttgggggttgttttttattaattttatgtaagttaattagtgtgaggtagattttcgttttttcgatataggtttcgagtttttttagttgtttatagttcgttagtttttgagttaatcggcgtggagtatcgtgaaggtcgaacgcgttttttcgggattttaggggtcgtgagcgttttattatttttttttacgttaattacggtatagttttgtagggaagggttcgttttttaatttttcgaggttttgcggtcgattaatagcgttttggttaattagcgagcggcgggatattgggtttttttttttcgggtttacgtgagttgtagggaaacgtaggggcggtttttaggtgttgtcgtcgttatcgttattattatttttatcgtcgtttcggaatttaggtttggggggcggtggggtcgcgtatggagttttcgtttttcggagttgttaatattgttaacgttatcgttacgttatatataggtgagttttgggtttggagggtggagggtttagttcgtgattttacgtatttttttcgttttcgcgtagaggatgtggtttggtcggtggtttgttggtgttcgatttttcgtcgttattattacggttggtggatttgcgtgtggtattgtttaagtttttcgttttttatagtggatttgatcgtggtttaatttttttttttcgttgtataatggatcggtttgcgtgtttatgtttttttttacgttaatttagggtggattcgtttataggttttttttttatttttatttttattcgttttttatttatttttatttatagggagttagtttgtgatagtgtttagtttttttaatagtaggtgtatttgagtgtttggattttttttagttttaatttttaggagattcgttcgtggttttatttattttattttttttgtatatcgtagcgaattaattcgtggcgtcgtattttttcgtatttttttttaatagtgagtttatttgagtttgtatttttgttttttttagttttttaatgtattagtttatggttttttttaaaattattttttttttttattattattattattattttatagtggattagtttttatgtttggatttacgtttttttagttattagtttattgttttgttttttttttttcgtagattgtcgttttagcgtttggggtttttttttttttaatagtgggttagtttagtgttttatatttttttatttttagtagtttagtttatagttttttttttttttgttttgaattagtttgtgtgatggtttttttttttttttattgtggtgtaggagtttgtaaggttttttgttttttttttttttagacgatgagttttattatttttttttttgtagtggatttgtttattggttttttttttttatatttttgtatgtttgtatagtttttcgtatattttttcgtgagtttagtgttttgtaattgggggaagatcggtcgtgtatttttaatttttttttttttttttttttttttttagaagagaacgtgttgatttttttttttttgtgatggagtattgtacggttttttttgttttttattttttaatagtgggttagtttggttatattcgtaattataaagacgttttgttttattataataagtgaatatattagcgttagtgatgatagtaatgttaataggagttagcgtttattgagtatttgtcgtatattaggtagagtgttttatatgaatgagtttttttaatttttattataattttatgagataggtagtgagggaattgggttatagggaggttaaattttttatttaaaggtggtttaggaagtatttaggatataggataatttttgaggttttttttttagattttattttattttacgtgaggttttagtttttaaaaattaaattagtttttatttttaagtttttgtttttgttgttttttttgtttgtagagtagtttttattttttatttttttttagtatttatttattttttaattttagtagttgtgtgattttagatgagtgatttaattattttttttttgtgtttttttttttatttgtgaaatgggggattagaattagaattttttttagtgtaaataaatattaattgtgaattaatggtaaaataagtaatttttttagtattatcgtttatatttttttatttttttattgtgttttaattatattggttttattatatagttttttaaatatagtaggtatgggttagttttagggtttttgtattggttgttttttgtgttttgaatattatttttagatttttgtatggttttttttagtattttgtttaaatattaatttttaaaggatgtttattatattgtggtgtgtggaatgtagtataaaaagatatatgtatgaaagatgtttttaagaatgttagtttatatatgagtaagggttttttttttttttaaaaggatgtgtttataagattgaggtacgtaatatgttttgtaaaggtataggtataaaagttgtttttaagagtgttagttgtatatgtgaataaggattgtgttgttgtattgaaagaatgtgtttataaaattgtggtgtgtagttgggtataggggtgtgtatttatagttttagttattcgggaggttgaggtgggaggatagtttgagtttaggagttttaggttagtttgggtaatatagcgagatttttttttttgaaaaaaaaaaatttaaaaaataattattgtggtgtgtgtaatatatttttttaaaggtataggcgtaaaagatgtttttaagagtgatttgattttgttgtatttgggtagtgttattttattaaaggttgattgttatattatggtatttagaatatattatataaaggtatatgtataaaaaagaagtttttaataatgttatttgtaaaaataaaaaaagttaatttttttttgattatttgaagttgtatatttagtagggtttaagttaggtttttgatttgtttcgttgttttttattattgtttgatatattgtgtgggttatttgtttgttgtttgtttttttttattagaatgtgagttttatgaggatttagtttttgtttgtttatttatcgttatgtttttagtaattgaaaatgtattaggtaaatagtagatgtttaataagaatttattttatgaataaatgggaaaaagataatttgagatattagtgtaggggttatatgaggaagaagaagggatatgagagttaattagttgggattgtttttgtaattaatttttattgagttttttgtgagtattaggtatttttttaggtgttggaatatggtaaggaacgaaatagggcgaaatatttgtgtttgtggagttgatatttattaaaagttggggaggttgggtacggtggttaatattagtaattttagtattttgggaggttgaggtgggtggattgtttgagtttaggagtttaagattagtttgggtattacggtgaaattttatttttattaaaatataaaaaaattagttgggtgtggcggcgtgcgtttgtaattttagttatttgggaggttgaggtaggagaattgtttgaatttaggaggcggaggttgtagtgagttaagattgtattatgtattttagtatgggtgatagagcgagattttgttttaaaaaaaaaaaaaaaaaaatttaagttggggagatagattatgtgaataaaataaataagtaaaattagtataatagataaatgttgagaagaaataatgaaatagggtaggtaggaatcgagtattgggggtggttgaaattttaggtatagggaaggtgatttttgaattagggttttacggtagagacggagagagttttaatgtttacgggaagagtatattaggtagaaggaagtgttagtttagaggttttgaggtgggatggtgtttgttatgtttaaggaatattaaggcggttagtgtggttggagtagagtgcggggaagggtagaaggtgaggttatataggtgatgggagttagatagtgtaggtgatatataggataggattgtaggggtagggggagaaggatgatatattagttaatagttaatatttgtggagtatttgttatatattagaggtatttttttgtttaaatattaatttttaaaggatgtttattatacggtggtgtttggaatgtattataaaaagatatatgtgttaaagatatttttaagaatgttagtttatatatgaataaggattttttttttttttaaaaggatatgtttataaaattgaggtatgtaatatgttttatggaggtataggtataaaagttgtttttaagagtgttagttgtatatgtgaataaggattgtgttgttgtattgaaagaatgtgtttataaaattgtggtgtatagttgggtatagaggttgaggtgggaggattatttgagtttaggagttttaggttagtttgtgtaatatagtgagattttcgttttcgaaaaaaaatttaaaaaataattattgtggtgtgtataatatatttttttaaaggtataggtataaaagatgtttttaagagtgatttgattttttggtatttgggtagtgttattttagtaaatatttattgttaaatattatggtgtttggaatatattatataaaggtatatgtataaaaaagaagtttttaataatgttatttgtaaaaataaaaaaaaaagttaattttttaagttttttatagaagtattttatagaattgatatagttaatttttatagaagttttggagggtaggtgtatttttgagaatatttgattttgagagtaaaatatttttattttatagatgaggaaataagtaaagagaggttgagtaatttgtttagggtaattttgagttagaatagttagaataggggtagaggaatataaggttgaagatttagaaagaagaatagatttgtaagggtaggtaggttatttggtatttttgattacgtagaggaagaatgaattttttttggaatgcgatgattgtgtaattgagtttatgaagtgagggaagagttttttttgcggggagagtagttcgtgtttatttttagaggttggaattgtttcgggaacggtagatagtttagggtggttgttttagagtttttgtatacgtcgttcgtttcgtttgaaggtttttttttatagagggtagtttggtttgttatttttttttttttaggttaggtgttatttttttggggaagaattttttgtatattttgtgtaaaaatagtatttttgttattttttaggattttatttttttttgtttttttttatggagaattggtggtgtaaggcgattgtttattagagttaaattatttaggttttgaatttcggttttgttaatttttagttgtgtgatttggggtaggttatttttttgtatttttattgttttatgtggaaaatgggggaaatgataatttttattttttaacggtggtttgaggatttaatgagttaaatgatttaaagagtgtgtagtttacggtaaggatcgtatgtttggtttgtatttttaaattattaaaatgtatttatagtatattcgtagatgtttgataggtttttgaaattgattatttttaaaattggtgtgattttttttaaaatttatttttttgtaaggtttttattttagttgattataatgttgtttttgtgggtgattaggttataaatttagatttattttggattttttttttatttttttcgggtatgttatttgttagtaagttttattttgtgtttaggttttttttagattttagttatttttcgttagttttattgttattattattatttatcgtagtggtttttttagttttaatagtttgttttttttataatcgttagggggattttgttgaaattttagttatagtttgttatttttttgtttataatttttttgtggtttttgttttatttaatattttgatagtattcgaaaaagtttggtttagtttggttttcgttattttgtttttttttttcgttgttttttttttttttttcgaatttatgttagttttttttttttatgttatttgttaggtattttttagttttgggttttttatatcggttgtcgtttttatttggtttgttgtttttagatatttacgagtttagtttttttatttttttttggtttttgtttagttgttttttttttggcgattatttttttttgattttttatgtaaaagtaatagtttttttttgtttgattttttttttataatttttattattatttgacgtatttttgtatatgtttgtttttttttttatttgttttttttgttaagatgtgagtttttttggagtagggattgttgtttgttgcgttttcgattgtattcgtagtatttggtttatagtatgtatttattaaatgtttgttaagtgaaggagatggaaagaagtaaatatatttaagtaaggtagattattagaatttttatgaggggttaagtgggagaaataataaaatataaagttttgtgtgttgttgaagttggaagtttatcgttattttttatttagttgataggttttgttgtagttgaaagaagaattggtaaaattgtttgtttttgttattaggagttattttgaattttttggatttttgaaataagtttgtttgtaaaataaatttagtgaggtttttggtgataggattttttaatcggatattttatggttttgtgatttgtataattgaataggaagtttatgtttatttttagtttgtttttaggaaagaaagtagtaatggggtgatagggaggattttgttttttgaaggatatgttgagagggaatagtcggtgtgaggggtcgtttagtttaatggtgaaatgtttagttaattggaatttgattgtttggttttaaatgttggttttgttatatgtggtttgtggaaggtacgtagatatttgtgttttcgttgttttatttataagttaatgataggaagattatttattttttagaggtatgattagggataaataagttaatgtttattaaaaaaaaaaataatagtataggtgtatatgtttttatttaaaatttttggggttagatgtgttttagaatttttatttttttatattttagaaaggtaatatgatgtatatacgatgttatataatattttttagtaagttttgtaatcggttgtgtttatatttttgtagtaaaatgtatgaatattcgtaataagtgagatttaataaagattagaaagggttttgttttattttaaattaggttttgttattaaaagagttaaaagaagttttttgtttttagagtattttggatgttggaatggtagataagggattatgaataaattagaaattaatatttagagtttattatatattttaggtatataatatttaatttgtataatatttttgtgaattaggtattgttatttttattttattaatgggtatattattatttttgttttatatatgagaaaattgaggtataaagaggttaaagaatattagttaagcgtggtgttttatgtttgtaattttagtattttaggaggttagggagagaggattgtttgagtttaggagtttaagaatagtttgggtaatatagtgagattttattttttaaaaaaagaaaaagaatatgtttagggttatatagttaataagtggtagaattaggatttaaatattggtaatttggttttagtgtttgggtagttgtttagtaggttatattgtttttttgtttagaagagtgtttgatgtgtattaagtttttaatagatgttaattattgttgttattaagaaagagaatatttagggtcgagtacggtattttatatttgtaattttagtattttgggaagttaaggtgggaggtgggtggattatttgaggttaggagtttaagattagtttggttaatatggtgaaattatgtttttattaaaaatataaaaattagtcgggcgtggtcgtgggtatttgtaattttagttatgcgggaggttgaggtatgagaatcgtttgaatttgggaggtagaggttgtagtgagttaagattgtgttattatattgcgttttagtttgggtaatagagagagattttattttaaaaaaaaagaaaaaaaaaaaaagaacgagaatatttagggatagtaataggatagagagattaggtatttatttagttttaggacggttttataaaggaaaggatttttgggttgggatttgaaagataagaaagattgttaggcgaaagaaggaagttttacgtggagtgagtagtttttgtaagggtttggtaaaaaaaaaattttttgaaaaatttgatattgatatggtagaagatatagataatatttaaatgaggaggatggaattagttttttatttttgttgtaataaataattataaatttagttgtttaaaataatatatttgttattttatagttttgtaggttagaagttttatattggttttagttgaaattaaggtattggtagggttgcgttttttttggaggttttaggggaaaatttattttttgtttatttaagttgttggtagaatttaattttttgagattgtaggattgaagtttttgtttttttattgtttgttagttgatagttatttttagttttaagaggttgtttatagtttttgattttgagttttttttttttatttttaaagttaataatggtaggttgagttttttttatattttgaattttttttgttttttttgttattatatttttgagttatttttttttttttattatttgttttttagagtttatatgattagattgaattttattaaataatttagaaataatttttttgttttagggtttgtaattttaattttatttgtaaagtttttttttgttatgtagtgtaaataatatataggtttcgaggattaggatgcggagtagggttggtattatttggtttattatagtttgttttttgatttttatagatttatatttgttttatatttaaaatatatttatattattttaagatatttatgagttgtattttattatagggagtattttaagtaagattggggagttagaagttagtttgggaaggtttagggaatgatggtagggtttgaagatagagatggagaaaagatgataaaaaaaggaatttttttttcgttgatttttgttttttttatgtttatagttttttaatttagttgtttgttttttagg

SEQ ID NO: 40 - DNA, 14147 bp, Artificial Sequence
  chemically treated genomic DNA (Homo sapiens)
tttggagagtaaatagttgagttgagaggttgtggatataggaggggtagaggttagcgggaggaggatttttttttttgttattttttttttatttttgtttttaaattttattattattttttaaatttttttagattaatttttagttttttagttttgtttgggatgttttttgtgatgggatataatttatgggtattttaggatggtgtgaatgtattttgaatgtgaaataaatgtgaatttgtgggggttagagggtagattgtggtaggttaaatgatgttaattttgtttcgtattttaattttcggaatttgtatgttatttatattatatagtagaaaggaattttgtagatgaaattaaggttataaattttaagatagggagattatttttggattatttgatgaaatttaatttaattatatgagttttgaaaagtagatgatggagaaagaaaggtagtttagagatgtgatgatagaagaggtaggggagatttaaaatgtgagagggatttaatttgttattgttggttttgaagatggaggaaggaggtttagaattaaggattgtgggtagttttttaaagttgggaatggttgttagttgatagatagtaaggaaatagggattttagttttataattttaaggaattggattttgttaataatttgaatgagtaggaaatggatttttttttagagtttttagaaggaacgtaattttgttaatattttgattttagttgagattagtgtgggatttttgatttatagaattgtaagataataaatgtgttgttttaagtagttaaatttgtgattatttgttatagtaagaatagaaaattagttttattttttttatttgaatattatttgtattttttattatattaatgttaagttttttaggaggttttttttttgttagatttttgtaaaggttgtttattttacgtggggtttttttttttcgtttagtagttttttttattttttaagttttagtttaaaggtttttttttttatgaagtcgttttaaaattgaatgaatgtttgatttttttgttttgttattgtttttgaatgttttcgttttttttttttttttttttttttttgagatggagtttttttttgttgtttaggttggagcgtagtatagtggtataattttgatttattgtaatttttgttttttaggtttaagcgatttttatgttttagtttttcgtatagttgggattataggtatttacgattacgttcggttaatttttgtatttttagtagagatatggttttattatgttggttagattggttttgaatttttgattttaagtgatttatttattttttattttggttttttaaagtgttaggattataggtgtgagatatcgtgttcggttttgaatatttttttttttgatgatagtaataattaatatttattgagagtttaatatatattaggtatttttttaagtagagaggtaatatggtttgttggataattgtttaggtattagggttagattgttagtgtttgaattttggttttgttatttattagttgtgtgattttgggtatattttttttttttttttaagaaatggggttttattatgttgtttaggttgtttttgaatttttgggtttaagtaattttttttttttggttttttaaagtgttaggattataggtatgaggtattacgtttggttgatattttttaatttttttgtattttaatttttttatgtgtaaaatagggataatgatatgtttattagtaaaatggggataataatatttagtttatagagatattgtatagattaaatattatatgtttgaggtgtatgataagttttaaatattagtttttgatttgtttatagttttttatttgttattttaatatttaaaatgttttaagggtagaaagttttttttaatttttttggtggtaaaatttgatttgaaatgaaataaggttttttttggtttttattgaattttatttattgcgagtgtttatatattttgttgtagaaatatgaatatagtcgattatagagtttattaaggggtgttatgtaatatcgtatatgtattatgttatttttttgaaatgtgaagaaatggaaattttgaaatatatttggttttaggggttttgggtaagggtatgtatatttgtattgttatttttttttttaatgggtattgatttatttatttttgattatgtttttgagaagtaggtagtttttttgttattaatttataaatgaggtagcggaggtataaatgtttacgtattttttataggttatatgtggtaaagttagtatttggagttaggtagttaggttttagttgattaagtattttattattaggttaaacggttttttatatcgattatttttttttagtatgttttttaaagaataggattttttttgttattttattattgtttttttttttgagagtaaattggaaataaatatgagttttttgtttaattatataagttataaagttatgaagtgttcgattagagagttttgttattagagattttattgaatttgttttgtaggtaggtttgttttagaagtttaaagagtttagagtgatttttggtggtaaagataggtaattttattagttttttttttagttgtaatagaatttattagttgagtgaaaggtgacggtgggtttttagttttaatagtatatagggttttgtattttgttattttttttatttgattttttataagagttttagtaatttgttttgtttagatatgtttatttttttttattttttttatttagtaagtatttggtgagtgtatattgtgggttaggtgttgcggatatagtcgagaacgtaatagataataatttttgttttagaggagtttatattttagtaggaaaggtagatgagaaaaaaggtaaatatgtataagagtgcgttagatggtggtaagggttatgggaaaaaaattaagtaggggagagttgttatttttatatggagagttaggggagagtagtcgttaaggaggggataattgggtagagattaaaaggaggtgaaggaattgagttcgtgagtatttgagagtagtaagttaggtggaagcggtagtcggtgtgaagggtttaaggttggagagtgtttggtaggtgatatggggagaggaggttgatatgggttcgggggagaggagggaggtagcgggagaggagaatagagtgacgggggttagattgagttaggttttttcgggtgttgttaggatgttgagtgagataggagttataagagggttgtgaatagagggatgataggttgtgattgagattttaataggatttttttggcggttgtgagaagaatagattgttggggttgaagaagttattgcggtagatgatggtggtagtagtggggttggcgagaagtagttggggtttggagaaagtttgaatatagaataggatttgttgatagatagtatgttcgggggaggtgagagaagggtttagggtgagtttaggtttgtggtttaattatttataaagatagtattgtggttagttgaggtgggagttttgtaggagagtaagttttgaggggggttatattagttttggagatggttagttttagaggtttgttagatatttacgggtatgttatgaatatattttaataatttaaaaatgtaagttaggtatacgatttttatcgtgggttgtatattttttgaattatttaatttattgaatttttaaattatcgttaaagggtggggattattattttttttattttttatatgaggtaatggaggtatagagaagtaatttgttttaagttatatagttggaagttggtagagtcggaatttaaaatttaagtggtttggttttagtgagtaatcgttttatattattagttttttatgaagagaaatagagaagggtaagattttagagagtgataggaatgttgtttttatatagggtgtataaggagtttttttttaaggaagtgatatttggtttgaaggaggggaggtagtaagttaggttgttttttgtgggggagggtttttaggcggagcgaacggcgtgtataaaggttttgaggtagttattttgaattatttatcgttttcgagatagttttaatttttgagggtaagtacgggttgtttttttcgtagggagagttttttttttattttatggatttaattatataattatcgtattttaggaagaatttattttttttttgcgtgattaaaggtgttaaataatttgtttgtttttgtaaatttgtttttttttttgagtttttagttttatgtttttttgtttttgttttggttattttggtttaaggttattttgagtaagttatttagtttttttttgtttgtttttttatttgtaaaatggggatattttatttttaaagttaaatatttttaaaagtatatttattttttaaggtttttgtgaggattaattgtgttaattttgtaaaatatttttgtaaaagatttgaggggttgatttttttttttgtttttataagtagtattgttaggaattttttttttatatatgtgtttttgtatagtatattttaagtattatagtgtttaataatgaatatttattgaaataatattatttaggtgttagaaaattaaattatttttagaaatattttttatgtttgtgtttttaggagagtgtattatgtatattatagtggttattttttgggttttttttcggagacggggattttattatgttgtataggttggtttggaatttttgggtttaagtgatttttttattttagtttttgtgtttagttatatattatagttttgtgaatatatttttttaatgtaataatatagtttttatttatatatataattagtatttttagaaatagtttttatatttgtgtttttatagagtatattatatattttagttttgtgaatatatttttttgaaaaggaggaaaatttttatttatatataaattggtatttttagaaatatttttgatatatgtatttttttgtagtgtattttaggtattatcgtgtggtaaatattttttgggggttggtatttgaatagaaaagtgtttttgatgtgtggtagatattttatagatattagttattagttagtgtgttatttttttttttttgtttttgtaattttattttatgtattatttgtattatttggtttttattatttgtgtgattttattttttattttttttcgtattttgttttagttatattggtcgttttgatgttttttgaatatggtaggtattattttattttagggtttttgaattggtatttttttttgtttggtatgtttttttcgtagatattaaggtttttttcgtttttatcgtgaggttttaatttaagagttattttttttatgtttaagattttaattatttttaatattcgatttttatttgttttattttattatttttttttagtatttgtttattatgttaattttatttatttattttgtttatatagtttgtttttttagtttgggtttttttttttttttttttgagatagagtttcgttttgttatttatgttggagtgtatggtgtaattttggtttattgtaattttcgttttttgggtttaagtaatttttttgttttagttttttaagtaattgggattataggcgtacgtcgttatatttagttaatttttttgtattttagtagagatggggttttatcgtgatgtttaggttggttttgaatttttgagtttaggtaatttatttattttagttttttaaagtgttaggattattggtgttagttatcgtgtttagtttttttaatttttaataaatgttagttttataagtataaatatttcgttttgtttcgttttttgttatattttagtatttagaagagtgtttggtatttataaggggtttagtaaaggttggttgtaggaatagttttaattaattagtttttatattttttttttttttttatgtgatttttatattggtgttttaaattattttttttttatttatttatgggataaatttttattgagtatttgttgtttatttggtatatttttagttgttggagatatagcggtgaatgagtagataaaaattgagtttttatgggatttatattttaatgaggagagatagataataaataagtaatttatatagtgtgttagatagtgataaagggtaacgggataaattagggatttggtttgagttttgttgggtgtgtagttttagatggttagggaggggttgattttttttgtttttataagtagtattgttaggaattttttttttatatatgtgtttttgtatagtatattttaagtattatggtgtgataattaatttttaatgaaataatattatttaggtataataaaattaaattatttttagaaatattttttacgtttgtgtttttaagagagtgtattatatatattatagtggttgttttttgggttttttttttttagaaaaagggatttcgttatattgtttaggttggtttggaatttttgggtttaagttatttttttattttagtttttcgagtagttgggattataagtgtatatttttgtgtttagttatatattatagttttgtgaatatatttttttaatgtaataatatagtttttatttatatatataattagtatttttagaaatagtttttatatttatgtttttatagagtatattacgtattttagttttgtgaatatatttttttgaaaaggaggaaaatttttatttatatataaattggtatttttagaaatattttttatatatgtatttttttatattgtattttatatattatagtgtggtaaatattttttgggggttggtatttgaatagagtgttgaaaggaattatgtagagatttgggggtggtgtttaaggtataaagaatagttaatgtaaaggttttgaggttggtttatgtttgttatgtttgaggagttgtgtggtggaattagtgtggttggagtatagtaagggggtgggaaggtataggcggtaatgttagaaaggttatttgttttattattaatttatagttaatatttatttatattggaagggattttagttttgattttttattttataaatgaagaaaaaggtatagagaggaagtggttaaattatttatttaaggttatatagttgttgggattggggggtgggtgggtgttgagagaaggtgaggaatgaagattgttttgtaggtagagggaatagtaagaataaaagtttggaggtgagaattaatttggtttttaaggattgaggttttacgtggggtgggatgagatttaagaggggagttttaaaaattattttgtgttttgagtattttttgggttatttttgagtaaggaatttaatttttttatggtttaatttttttattatttattttatggggttgtggtgaggattaaaggaatttatttatatgaaatattttgtttgatatacggtaggtgtttaataaacgttagtttttattggtattattattattattggcgttaatgtatttatttattgtagtgaggtagaacgtttttgtggttacgagtgtgattaggttgatttattattaagaggtggaggatagggaaggtcgtatagtgttttattataaggaaaagaggattagtacgtttttttttgggaagggaaaaaaaaagagaaggaaattgaaagtatacggtcgatttttttttaattataaagtattggatttacgggagggtatgcgggggattgtgtaagtatataggggtgtgggggaggaaggttaatgaatagatttattgtaaagggaggggtgatgaggtttatcgtttgaggggaaggggagtagaaaattttatagatttttgtattatagtgagaggagagaaaagttattatatagattgatttaaagtagagagggaaaaggttatggattgagttattgaaaatagggagatgtaaagtattaaattaatttattattaaaaaggagagaattttaagcgttagagcgatagtttacgaaaaagaggagatagggtaatggattgatagttaaagggacgtgaatttaaatatgaagattgatttattataaaatggtggtggtggtggtggggggggggggtggttttgaaaaaagttatggattgatgtattgggggattggaggaggtaggaatataaatttaggtagatttattgttaaagagggatgcggaggagtgcggcgttacggattgattcgttacgatgtataggaagggtggaataaataaggttacggacgggttttttgaaagttgaggttaggagaaatttaaatatttagatatatttattattaagggggttgaatattgttataggttagttttttataagtgggggtgggtggggggcgggtgggggtaggggtagggggaaagtttatggacgagtttattttaagttggcgtggggaaaaatataagtacgtagatcgatttattatataacgggagggggaggttaggttacggttagatttattataagggacgaagggtttgagtaatgttatacgtaggtttattagtcgtggtggtggcggcggggagtcgaatattagtaggttatcggttaagttatattttttgcgcgggggcgggaaggatacgtggggttacggattgggttttttattttttaggtttagagtttatttgtgtgtagcgtggcggtggcgttggtaatgttggtagtttcggggggcgggggttttatacgcggttttatcgttttttaggtttgggtttcgaggcggcggtggaggtggtggtggcggtggcggcggtagtatttagaagtcgtttttgcgtttttttatagtttacgtgggttcgaggaggaggagtttaatgtttcgtcgttcgttgattggttaaagcgttattaatcggtcgtaaggtttcgaggggttgggggacgggtttttttttatagagttgtgtcgtgattggcgtaaggggaaatgatggaacgtttacggtttttggagtttcgaggaggcgcgttcggtttttacggtgttttacgtcgattggtttaaggattgacggattgtgagtaattgaaaaggttcggggtttgtgtcgggggggcgggggtttgttttatattgattggtttatatgggattgatggaagatagtttttaaggacgggggtgggtggttttgtttttttttgattggcggacgagggatttttagatttttgttaaaatattaagggggcggtgtcgtacgttatgttgtttagcggaagtagggtttgtatagaaatgggcgtagtagtcggcgggagtgggtcggattgggtttcgcgtaggcgggtagggtagttttacggttagataagattatagagttgggtaaagacgaatttagaatatagcggaggtaggagggtaggatggttgttaggtatacgaaagagtattgagtggtagaaacgaaatgtttttagagggtagggttgaattgcggttagagttaaaaaggggaggaatttggttttgtattgattggcggtggttggatttaatttagaataggggttcgattagggagagcgggatttaggtttgtgtttattggaagttggaatatttataagtaggggttaagataaggtagggttgagttagggtttgggtgtaatttggggtatttggggaatgattgggtgtgtgaaagcgtaaattttagggttttttgattgttgtgggaatgaataaatttttattatgaattggtttattttttatggtaatttaaagggtggcgtttaggaaaaggaatggaagaaagggtgaggtggggggtttaggttgttaagatgatagaagagagggtagtgtataaggttaattggtaaatattgttaggtaataggttggaggtaggattgttggggtattttggaggttttatagagagattggatttttgggttttttagtaattttgtgttttaggaataggttttcgtggtaattagtagggtttatggggaaaaagaagggttatgtgatttaaaggtatttaggttttttaatgtttgaggatggggggaagaagttaatggtgaggtttttttgggaaattttgtaggttttgtagttttttaagtttttgaaaaagaggatagaagagattgaataaagattgggtttgggttacgtttttaggtttgttttgattttttttttttgattttagtttagagggaaagatggttttttttttttttcgtttttttttttttttaggttattattttaaatatagagtttggtagtggggtgagttgtttttatttttagtaatatgtggatatgggttttgatatttatggagtttttggtgaggttgttgttgagtttagagaaaagaaataagaaagggtaaaatgggttttatatgattatgatgatttttttttattattttaagatttatttatattttggatgatttttatttggtttatttttatgtggaaatgttaagttattatttggtttttattgatttaaagattattaaatgtttattgtatgttaggtaattttaggtattgggagatagtagtaaatataataaataaaattttcggtttgatggattttaaatttttgtaaagaaagatataataaaaaattaatggaataaaagttatgtgttagatggttttaattataataataaaaattaaaaatgagagataataaggagtataggagtggggggttgtaattttaaagagggtttagggatggttttacggagaagtatttgagtaaagatttaaagatagtgaattttgagtagtgtggttatatggaggatgtgttttatatataaggggtagtaaatataaaggtattgaggtgggagtgtgtttggtatgtttgaggtgtagtaaagaggttattttggttggagaagaataagtgaagggggaatgtaagaggtgaggttagagaggtaatgagggagataaattgtgtgaagtttataaggttatggtaaggattttggttttgattttaagtgagatgggagttaagggaaggttgtagtagaggaaggaggttgaattatatgaattagttagttgattttttttttttaagttagtttggattagatttcgtttaaaagaattttaattgatataaagggttaaggaaggttttttttaagaatgaagaatgagaaggaatcgaagaatgtttaatggttaagtagtaggaaggttttttttataaaaaggataagaggtaataaagagttgtttgagaagtagtgaggttagagtgttagaaattgagtggggagggaaagtggtttaagataaggtttaagagataggaagaggttagattatatagggttttaatataataaggaatgtggattttattgtgttgttaatgtaggagttagtttgaggggtaaatgaaattaaatattgttggaaaagtagagagtaataagataggatgttaaattggaaaaaaaagtagtatgaatttatgtatatattaatattttttatatttttatttttagtttagaatttttttttgaatttgattagttttaatgatattttttaaaaatttattttagtgtttaataagtgttttatatttaataggttttagattaaatttttgatttttttttttaaatttattttttttttaatttttttattttagataatggtaattttatttttttagttgtttagttaaaaatttgggttttttttttttatattttatatttagttagttattttttttaaaattatgattgttttattgtaggtaatgtttttgatttttatgatatgttttttttatagtattgttaatatttgatatattatattatttatttgtttattgtttgttttttttgattagaatgttagttgtatgagggtagattttgtttttttttgttttttgttttatttttagggattagaatagtgtgtggtatagaggaggtatttaacgtatgttgaatgaataagtgattattttattaaaaggaatttgaggttggttgagtgtatgtttagggataggaaataaatgaagtatgggtgttgttgttagagagtaagaatatttttaagaatattttgggggtaatgtttaaagaatagaagaatgaatttgattagtttttaagggataattttaatattaaaaaagagaataaaattagttaatggtgtaagtttattttatgaaaatttatgagtttaatattttaaaagggagaaaaatatagagtttattaaatgttagttgtaatataaaagggatatgtttattattgttgatttatttttatttgttatgtgagaagtaaattattattgatttagtatgtaaggtagtgtgaatagttatatggttatgtttttttttttttttttgagatggagttttattgtgtcgtttaggttggagtgtagtggcgtgatttcggtttattgtaatttttatttttcgagtttaagcgatttttttgttttagttttttaagtagttgggattataggcgtttgttatcgttttcggttaattttttgtatttttagtagagacggggttttattattttggataggttggttttgaatttttgatttcgtgatttatttatttcggttttttaaagtgttgggattataggtgtgagttatcgcgttcggtcgttaggttgttttttttataattatatgtttatttatgagatgtggatgtgtatttttttttgtgttattaggaaagaatatagagattttattttttttattttttaaataaagaaatatattaagaataggaagaattgatatttttgattatataaaatgattagaaagttagtttaaagtatattttaagtaattaaatatttttaaaggatagttagttatatagatttaaatttttattttttagaaaaattaaatttttagatagttttattaattataataaagtagtaagatttaattatattttttattatattaatagattaggttagtatattaaaaagattaggtaagggggtaggtattgataatttaaatattttattttggggaagtacgtggagttttaaaatattaaaatttatttgataggtttaggaattttgtgatataataaggaaagtttttttatataaattagattttagttgggcgcggtagtttatatttgtaattttagtatttagggaggttgaggtgggtagattatttgaggtcggagtttgagattagtttggttaatatggtaaaattttgtttttattaaaaatataaaaattagtcgggagtggtggtgggtgtttgtagttttagttatttgggaggttgaggtaggagaattttttaagtttaggaggtagaggttgtagtgagttaagatcgtattattgtattttagtttgggcgataagagtaaaatttcgttttaaaaataaagtggatttggtttaaatgattattagtttagaattgtgttgattatgaaagtaggtcgtttaattaaattatttgttaattggtttgaatattaagaattagaaattttagtaggtttgaggtttttttgggtttattagtatttgttagttttttttatggttggaaaggtttgaaaagataaaaattattgaaattttaagggaggtaattttggaaaaaatgaatgtagaatagatataaatataaaatataattaataaagaagtttaaattaatggtatttatatttgtgagatgttgttaatttaagtgtattgtttagtgttttt

SEQ ID NO: 41 - DNA, 3647 bp, Artificial Sequence
  chemically treated genomic DNA (Homo sapiens)
tatggtttagtttttagtttagttttgtgattttgggaaagtttttttagttcgtggaattttaaggtttaaggttttttttttgtaaaatggggaatgataatatttgttttttttggagttttggggatttagtgttttgaggaacgtggttgtaggttagagtggtatagagtagggtttaatgaagtatggcgtttatagtagtttttttgattggattaattttttcggatataatagtagggtaggggtggggtttggggagaaaggatatttttaattttgattttaatatttcgatggtttttaaggttgtttgtatatttatttaggtgtaagttttttaaggtgtggtgtgatgaattagtgatttttggagttaggttagcgtatttttttttcgtagggttgtaagttgtaggattgagaggtaggttgattaggttttgggttggatgatggggtgagagtaaggggttagttttgatatatgtttaatttttttttttagttttaagatattttgggtaaattgtttattttagtttttttgatttttattttaattttaatattagtttaagagaaaatagggatattgatggttatttagaagggttgttgtgttttatatatagtaatatttttcgaatgtttgtgatagcggtttaaggaataagttaattttatattattattttggatatttgtataaaattttattttatttttattatatgaatgtgttagggttgtttttttgttttgttttttttttttttttttgagatagagtttcgtttttgttgtttaggttggagtataatggcgcgattttggtttatcgtaattttcgttttttaggtttaagcgatttatttgttttagttttttcgagtagttgggattataggatgcgttattatgttcggttaattttgtgtttttagtagagatagggtttttttatgttggttaggttggtattaaattttcgattttaggtgatttatttgttttggttttttaaagtgttgtaattataggtatgagttatcgtatttagtcgtgttagggtttttttttgtttaatttttttttttttttttagtttttttttgtttgttttaatggagttttattttgttatttaggttggagtgtagtggtaagatttagtttattgtaatttttgttttttgagtttaagtaatttttttgttttagtttttcgagtagttgggattataggtgtttgttattatatttagttaatttttgtatttttagtagagatggggttttgttatgttggttaggttggtttcgaatttttgatttcgtgatttgtttgttttggttttttaaagtgttgggattataggtatgagtcgttatattcggttaatttttgtattatttttttaaagagagttttttaaattatataagttttaggttttataaaatttagatttgttttagtataattaaatttgggattatttattgagtaattattatgtgttaagtattgcgttgagtgtttttagagtattattttttttaattttagtatagtatgttagatgttgttttatagatgagttaattgagattagagatgtttagttatttgtttaaggtgatatgattgatatggaatagagttaagatttttttttttttttttgatacggagttttattttgttttttaggttggagtgtagaggcgtaattttagtttattgtaagttttgttttttaggtttacgtatttttttgttttagttttttgagtagttgggattataggtattcgttattatatttggttaattttttgtatttttagtagagatagggttttatcgtgttagttaggatggtttcgattttttgatttcgtgatttgtttgtttcggttttttaaagtgatggaattataggtgtgagttatcgcgattggttagatttaagatttgaatttaggtttttttggttttagaggtttttgttttttaattttttagtatgtatacgtatttgtttttttagaggtgtttgtttaagtgtgtttagtatatggaagtaagttagaaatgttaggtatatttgtaaagaggtgtgggagatgggggggagggaagagagaaagagatgttggtgttttttattttttagtttttgataggtgtttttgatttttttttgattagtatagttgtatttttggttggggtattttaattagaattgttaaatttagtatataaaaataaggaggtttagttaaatttgaattttagataaataatgaataatttgttagtataaatatgttttatgtaatattttgttgaaattaaaaaaaaaaaaaaaagttttttttttatttttatttttattattaggtttaaggaatagggttaggggttttaaatagaatgtggttgagaagtggaattaagtaggttaatagaaggtaaggggtaaagaagaaattttgaatgtattgggtgttgggtgtttttttaaataagtaagaagggtgtattttgaagaattgagatagaagtttttttgggttgggtgtagttgttcgtggttgtaattttagtattttgggaggttgaggcgggaggattatttgagtttgggagtttaagattagttttattaacgtggagaaattttgtttttattaaaaatataaaaaatttagttggttatggtggtatatgtttgtaattttagttgttcgggaggttgaggtaggagaattatttgaattagggaggtagaggttgtggtgagtagagatcgcgttattgttttttagtttgggtaataagagtaaaagttcgtttaaaaaaaaaaaaaagttttttcgatgtgattgtttttttttaaatttgtagatttttttaagattatgttttttagatattttaaagattttagaagatatgtttcgggggttttggaagttataaggtaaatataatatatttttttttttgattattaattttattagaggatgtggtgggaaaattattatttgatattaaaataataggtttgggatggagtaggatgtaagttttttaggaagttagataattgagatttaaagggtgttaagagtggtagtttagggaaatttatttcggatttcgggggagggggtagagttattagtttttgtatttagggatttttcgaggaaaagtgtgagaacggttgtaggtaatttaggcgtttcggcgttaggagggacgatttaggtttgcgcgaagagagggagaaagtgaagttgggagttgtcgatttttagatttcgttggaatgtagttggagggggcgagttgggagcgcgtttgtttttaattatcggagaaggaggaggtggaggaggagggttgtttgaggaagtataagaatgaagttgtgaagttgagatttttttttattgggatcggagaaattaggggagtttttcgggtagtcgcgcgtttttttttacggggttttttattgcgtcgcgcgttcggtttttatttttcgtagtatttcgcgtttcgcgtttttttagtcgggtttagtcggagttatggggtcggagtcgtagtgagtatt

SEQ ID NO: 42 - DNA, 3647 bp, Artificial Sequence
  chemically treated genomic DNA (Homo sapiens)
ggtgtttattgcggtttcggttttatggtttcggttggattcggttgggagggcgcggggcgcggggtgttgcgaggggtgggggtcgggcgcgcggcgtagtaaagggtttcgtgggaaggggcgcgcggttgttcggggggtttttttggttttttcggttttaatggaggggaattttagttttataattttatttttatatttttttaagtagttttttttttttatttttttttttttcggtgattgggagtaagcgcgtttttagttcgttttttttaattgtattttaacgaagtttgggagtcggtaatttttagttttatttttttttttttttcgcgtaggtttgggtcgttttttttagcgtcgggacgtttgggttgtttgtagtcgtttttatattttttttcggagaatttttaaatgtagaggttggtgattttgttttttttttcggagttcgggataaatttttttaggttgttatttttaatattttttaagttttagttatttaattttttggggagtttgtattttattttattttaagtttattgttttaatattaaataatggtttttttattatattttttagtaaaattgatagttaaggagggggatgtgttgtgtttattttgtggtttttaggattttcggggtatattttttggaatttttgaagtatttgaaaagtatgattttaagagggtttataaatttgggaggagatagttatatcgaaaggatttttttttttttttaaacgaatttttgtttttgttgtttaggttggagagtaatggcgcgatttttgtttattataatttttgtttttttggtttaagtgatttttttgttttagtttttcgagtagttgggattataggtatgtgttattatgattagttgaattttttgtatttttagtaaagatagggtttttttacgttggtgaggttggttttgaatttttaagtttaggtgattttttcgttttagttttttaaagtgttggaattataattacgagtaattgtatttagtttaaaaagatttttattttaattttttaaaatgtattttttttgtttatttaaggaggtatttagtatttaatgtatttaaggttttttttttgttttttgttttttattagtttgtttaattttattttttaattatattttatttggagtttttgattttattttttaggtttagtggtaggggtggggatggaaggaagatttttttttttttttttaattttaataagatattgtatgggatatatttatattaataaattatttattgtttatttgaaatttaaatttaattgggtttttttatttttatgtgttaaatttggtagttttagttggaatgttttagttaagaatgtagttatattggttaagaagggattaaaggtatttattagggattggagaatgaaggatattagtatttttttttttttttttttttttttattttttatatttttttataggtatatttagtatttttaatttgtttttatgtgttgagtatatttaagtaggtatttttagagggataggtgcgtatgtatgttagggagttgagaaataggggtttttgggattaagaggatttgggtttaaattttgaatttggttagtcgcggtggtttatatttgtaattttattattttgggaggtcgaggtaggtagattacgaggttaggagatcgagattattttggttaatacggtgaaattttgtttttgttaaaaatataaaaaattagttaggtgtggtggcgggtgtttgtagttttagttatttaggaggttgaggtaggagaatgcgtgaatttgggaggtagagtttgtagtgagttgagattgcgtttttgtattttagtttgggagatagagtgagatttcgtgttaaaaaaaaaaaaaaaaattttgattttattttatattagttatgttattttgggtaagtgattgagtatttttggttttagttggtttatttgtaaaatagtatttgatatattatgttggggttaaaggagataatgttttggaagtatttagcgtaatatttggtatataataattgtttaataaatggttttagatttagttatattggggtagatttaggttttgtggggtttgaagtttatataatttgggaaattttttttaagaaagtaatataaaagttggtcgagtatggcggtttatgtttgtaattttagtattttgggaggttaagataggtagattacgaggttaggagttcgagattagtttggttaatatgataaaattttatttttattaaaagtataaaaattaattaggtgtggtggtaggtatttgtaattttagttattcgggaggttgaggtaggagaattgtttgaatttagagggtagaggttgtagtgagttgagttttgttattgtattttagtttgggtgatagagtaagattttattgaaataaataaagagaggttaaagagagagaaaggaattgaatagaaaaagattttagtacggttgggtgcggtggtttatgtttgtaattgtagtattttgggaggttaaggtaggtggattatttgaggtcgggagtttggtattagtttgattaatatggagaaattttgtttttattaaaaatataaaattagtcgggtatggtggcgtattttgtaattttagttattcgggaaggttgaggtaggtgaatcgtttgaatttgggaagcggaggttgcggtgagttaagatcgcgttattgtattttagtttgggtaataagagcgaaattttgttttaaaaaaaaaaaaaaaaaataaaataaaaaaataattttagtatatttatatagtaaggataaggtggagttttgtataggtatttagagtgataatgtaaaattaatttattttttggatcgttgttataaatattcgagaaatattgttgtgtatggaatatagtagtttttttggatggttattaatatttttatttttttttgagttggtgttagggttagggtgaggattaggggaattgaggtaagtaatttgtttaggatgttttagggttagagagaaaagttgggtatgtattaaaattgattttttatttttattttattatttagtttaggatttggttaatttgttttttagttttgtagtttatagttttgcgggaagaggatgcgttgatttggttttaggagttattggtttattatattatattttggagggtttgtatttggatgagtgtgtaggtagttttagaggttatcgggatgttaggattagggttagaggtgttttttttttttaggttttatttttgttttgttgttgtgttcggaaaggttagtttagttaggaaagttattgtggacgttatgttttattggattttattttgtgttattttgatttatagttacgttttttagaatattgagtttttaagattttagaggaggtaggtgttattattttttattttgtagaagaggaattttgagttttgagattttacgagttaaaggaatttttttaaggttatagagttgagttgggaattgagttatg

SEQ ID NO: 43 - DNA, 5312 bp, Artificial Sequence
  chemically treated genomic DNA (Homo sapiens)
gtcggtttcgggggtcgacgatttttcgggtaggcgacgtgttttgtttaggttttatttttcgcgttcgtaaaacggggtggataacgtagtttaaggtagagtcgcgttaaggtttttcgttgtcgtcgggttttggcggtttgatcgggtttggggttcgagcgtgttttcgggtttgggggggtcgtcgcgatggattcgttggtagcgttttaggatcgtttggtggagtagttgttgtcgtcgcggatttaggtttagaggcggtttaaggtgcgtgtgtggagagggcggaacgtgggtttgtgatttcgcgggtttcgggattcggtatggggttttcgttttcgcgcgttacggttcgttagcgtttaggtttagttttttttttcgtagcggtttcgtaggttcgcggttttacggtggggcgacgtgttttgtttaggttttattttacgcgattttaaaacgcggcggagaatgcggtcgtgggatttttttaggggttttaagggtttgcgggggttgggcgtttgggcgcgcgggcgggggaggttcggcgtcgcggtttataaataggcgttgtttcgttatcgtcgttgtcgtcgttttcgcggttggattcgggttaggtggggtttttcgttttttggtatttttcggaggggtgagtgtcgaggtttttagttttttcggtttatggagggttttgagtgtgttttaggggttttaattttgttgttttttgttcgaggagggaggatatcgtttgtgtttgttgcggtttgatatttttttacggaataaatatagtgtcggtttttgtagagttttttttgggattggggttaggggtgtttttttttgttattatttcgtttgtttttttatttttaggtttttgtttacgggttttttttttatttttgttaacgaaatgttttattttgggaatcgtattttttgttgtttttttatatcgtatttggtaagagatagggtattgggtttttggagaaatttttgtgtttttattttgttttattttgtttttaggatattgataagtagtacgtgggtttcgttatattgtttaattaggtgtatcgtaagtcggtgaagaaaggttttgattttatatttatggtggttggtgagtgggttaggtttttcgggggagtggttggggttattggttagttaagttttgtcgttggagttttagatttaacgtagttttttttttgtatttgtgtgtaggtgagttaggtttggggaagtttatattggtttatagtttttttttgatagatttgtataaggatcggaagttgtttagtgttgagggtgagtggtttttaggaggttttggtattgatttttagtttttttttatgggatttttttaaggatttttttttaggtttagtttttattgttttgttttcgcggtgtgggttttttgggggtagggttaaggtattaagatggatgaggacgagggttttggttgttaagggtgaggggttgagggttggagaggtttttttagtggtttttttttcgtagagcgtattagttagacggtagagattttaaaatatacggtggatattgaggagaagggagttaagttgaagtttattatcgtggatacgtcgggattcggggacgttgttaataatatcgagtggtgagtgaggtttgttgagaaaggttttgtttaggcggttatagtattcgaggtttggttttattttttttttgtttatagttggaagtttattatcgattatgtggattagtagtttgagtagtattttcgtgatgagagcggttttaatcgaaagaatatttaagataatcgagtgtattgttgtttatattttattttttttttcgggtatgggtgtgtggttgttttggggttaggttcgggagtgtagtttttataatatggttttttggttgtgtttatgtttatttttggttgttttcggtaggttgcggttagtggatgtgggttttatgaaggtattgtatgagaaggttaatatcgtgttttttatcgttaaagttgattgttttgtttttagtgagattcggaagttgaaggagcgggtgagtttgtcgtcgtataggggtttggttagggttttggggttgagagtattagggggatttgtttggttttaaatttgatggtttttgttttattatagattcgggaggagattgataagtttgggatttatgtatattagttttttgagtgtgattcggacgaggatgaggattttaagtagtaggatcgggaattgaaggtgaatatgtagattggtggggtaggggggatggagttggtgaggggtagaattagagggttttgttttttttatattgagtttgttggaggagggttaggttagtttagttgggtgtaagagttatttgttttaggagtagaggatttgtattttttttatttagggttagaaggtaaaggttattatgtttttgtttggttggggtgggttatgtgggtttcgtgtggtgtttggtaggtatggagtatttgtttagatttagaggtgtagtagtgggttaggtttttaattttaattttttttttatgggttattagaggaaggggttgttttagtggtatattttggtttttagatttttgagttttagggttggtggttttgggtgtttcggtagttagagtgatgatggagattatgttaggggtaggtggttattagggtaggggtattagtatggggagatataggtttagttttggggagggaaggggtagttggagggggtggtttttgatgagggaggagatgaggagggagtatgtttggttgggtatagtttggaaaggttttggaatgtgagttatatgggttttggttttagttaggggtagagaggttagaaaggggtaacgttaggatttttttgaggagagatagttgatggtgatgttggaggggtgtttcgggagttatatgttcgttttttattagtaatcgtgtaattacgtttatcgggtgtgagttttttttttttttttttttaggagagcgcgtttttcgtcgttataggtagtaatacggtggtggaggttaaggggtagcgggttcggggtcgattgtatttttgggggatcgtggagggtgagtagagttttggggtattaggtttggtgggggaaggttgttttgggtcggcgttagtttattatttatttttatttcgtagtggagaattaggcgtattgcgatttcgtgaagttgcgtaatatgtttattcgtacgtatatgtacgattttaaggacgtgacgtgcgacgtgtattacgagaattatcgcgcgtattgtatttagtagatgattaggtgcgcgttttagtcgcgagttagatttcgtttttttggtttcgtttacgtttttataattgagggtcggttttgttagtttatttagatttgaattttgtattattttttaagtttttttttttttttagagtttggtttttttagaattaagtttagggttgtgagggtttcggagggtagggttttagtagtggcggggatgggttaggtatcgttagtttacgttgagtttttcggtggcgtcgtttcgtttattttttttttcgtttcgcgtagtaaattgatttaggatagtcgtatggagagttttatttcgattttgtcgttgtttatttcggacgtcgagattgagaagtttattaggatgaaggatgaggaagtatgtggggcggcgggggcggcggaggcgggcgttagggatgttttttcgcggtgttgtttattcgtcgggttgttttcgttcgtagttgaggcgtatgtaggagatgttgtagaggatgaagtagtagatgtaggattagtgacgttcgtcgcggatatatcgttcgttttcgggacgttttcgtatttttggatattagatcggattgttttcgattcggagacgcggggttatagtttttagttgattttaatttatttttagtattatttttttttaggttattgtgtttgttttcgaggggtttggatcgtagttttcgtttagttggttttttttgattttgggggattaggagcgaagttgggcgggattttagagattcgttttttttgtttttttttcgttttcggacggttatagtatttaaatcgtaggttttgttttggtaggtaggtaaagttaggtagaagaggatttttaggattttgggtttgttttttgttttagtgttgtagaacggatttgggagtttttttttgtttgttttcgcgggttatttagcgagtgttgagattttattttttgtcgaggcgggtcgagtttttttttatttttagacgtttagcgggtagggttgggttgaattaaatgggagttttttagatataaggaggttagaggttgtaaggagcggggtcgtgatcgtttatattttttttttatagttcggttcgatttggagggttttcggggtattgggcggtgagttattttttggtaattttcggtgtcgttttttgttttcgttcgaggttttttttttttagtatcgttgtggtgtgtcgggattttgagtttaggtttttcgatgtttttattcgtatgattttttttcgttatacgatgtttcgttttttttcgttgtgaatgtcgcgttttgttttggtgataggagaataatgttggtgaacgtcgtagcgggtgttcgagtgtttcgtgtgtttttgagagcgggtgggagcggaagtttgagcggtttgcggttttcggcgatagtgtgttatttgtcgttgtagcgcgcgttcgcgcggtttttgggttatttttggttaggtcgtagtattgtggtcggtgcgggcgtggtaggggcggggcggttttatcgttcggttttttcgtttacgtttttcgttgtagagtaagtcgggttgtcgttttttcgttatgggtttcggtgagtttggagttcggtcgggttttcggttgttttttaggtcgattcgggttgagaggagttttggtcgtttggttgtagttgggagagatttgggttagatttagaggggatttttagtcggcgtgcggggtggttagggtggagaggttggcgggttatcgggacgtcgggtattaggggttggatggagtcgggtcggtagtttgggtatttagagatgtcgtttaggtgttcgtcgatcgttcggtttattgcggcgttttttttgtagg

SEQ ID NO: 44 - DNA, 5312 bp, Artificial Sequence
  chemically treated genomic DNA (Homo sapiens)
tttgtaagggaagcgtcgtagtaagtcgagcggtcggcgggtatttgggcgatatttttgagtatttagattgtcggttcggttttatttagtttttgatgttcggcgtttcggtagttcgttagtttttttattttgattatttcgtacgtcggttggaagttttttttaagtttgatttaagttttttttagttgtagttaaacgattagagttttttttaattcgggtcggtttagggagtagtcgggggttcgatcggattttagatttatcggagtttatggcgagaagacggtagttcggtttattttgtagcgggaggcgtaggcgggagagtcgagcgataaggtcgtttcgtttttgttacgttcgtatcgattatagtgttgcggtttggttagaaatagtttagaggtcgcgcggacgcgcgttgtagcggtagatagtatattatcgtcggaggtcgtaggtcgtttaggttttcgtttttattcgtttttaggggtatacggagtattcggatattcgttgcgacgtttattaatattgtttttttgttattaggataggacgcggtatttataacggaagaaaacggagtatcgtgtggcgggaagggattatgcgggtgggaatatcgggaggtttaggtttaggatttcggtatattatagcggtgttggggagaagaggtttcgagcgagggtaggggacggtatcgagagttgttaggaggtggtttatcgtttagtgtttcgggggttttttaggtcgggtcgggttgtggagaaggggtgtaagcggttacgatttcgttttttgtagtttttggtttttttatgtttggagggtttttatttgatttagtttaattttgttcgttaggcgtttggggataagggaagattcggttcgtttcgatagaaaatggggttttagtattcgttgggtgattcgcgggagtaggtaaaggagggtttttaagttcgttttgtagtattggggtagggaatagatttaggattttgggaatttttttttgtttagttttgtttgtttgttagagtagggtttgcggtttgggtgttgtgatcgttcgggggcgggggaagggtaagggaggcggatttttgaagtttcgtttaatttcgtttttgattttttaaggttagagagggttagttgggcgggggttacggtttaggtttttcggaaatagatataatgatttgggagggggtggtgttgagaataaattagggttagttgggggttgtggtttcgcgttttcgggtcgggaatagttcggtttggtgtttaggggtgcgagggcgtttcggagacggacggtgtgttcgcggcgagcgttattggttttgtatttgttgttttattttttgtagtattttttgtatgcgttttagttgcgggcggagataattcggcgggtgagtagtatcgcggaggagtatttttgacgttcgttttcgtcgttttcgtcgttttatatatttttttattttttattttgataagttttttagtttcggcgttcggggtgggtagcggtaggatcgggatggggttttttatgcggttgttttgggttagtttgttgcgcggggcgggggggaggatgggcggggcggcgttatcgggaggtttagcgtgggttggcgatgtttggtttattttcgttattgttgaggttttgtttttcggagtttttatagttttggatttggttttagggagattaggttttgggggagggggggggtttagggaatggtgtaaagtttaagtttgggtgggttgataggatcggtttttagttatggagacgtgggcggggttagaggggcgaggtttggttcgcggttggggcgcgtatttggttatttgttggatgtagtgcgcgcggtagttttcgtagtgtacgtcgtacgttacgtttttgaggtcgtgtatatgcgtgcggatgagtatgttgcgtagttttacgaagtcgtaatgcgtttggttttttattgcggggtgggggtgggtagtgggttggcgtcggtttaggatagtttttttttattagatttggtattttaagattttatttattttttacgattttttaggggtatagtcggtttcggattcgttgttttttggtttttattatcgtgttgttgtttataacggcgaagggcgcgtttttttgggggaaggagggagaaaggtttatattcggtgagcgtaattgtacggttattgatgggaaacgggtatgtaattttcggggtatttttttagtattattattaattatttttttttaaagagattttggcgttgtttttttttggtttttttgtttttggttggagttagagtttatgtggtttatattttagggtttttttaggttatgtttaattaggtatgttttttttttatttttttttttattaagaattattttttttagttgttttttttttttttagggttgagtttatgtttttttatgttgatgtttttgttttggtggttatttgtttttggtatggtttttattattattttagttgtcggggtatttaaagttattaattttggagtttagaaatttgggagttagggtgtgttattggggtagtttttttttttggtgatttatgggaagagggttggggttgggggtttggtttattgttgtatttttggatttgggtaagtgttttatatttgttaagtattatacggggtttatatgatttattttagttaggtaaagatatggtgatttttattttttagttttggatgaagggggtataggttttttatttttagaataaatgatttttgtatttaattgggttgatttggtttttttttagtaggtttaatgtgaaggagataaagttttttggttttgttttttattagttttattttttttgttttattagtttgtatgtttatttttagttttcggttttgttgtttgaagtttttattttcgttcgagttatatttagggaattggtatatatggattttaaatttgttaattttttttcggatttgtggtggggtaaggattattagatttgaggttagataagtttttttggtatttttagttttagggttttggttaggtttttgtgcgacggtaggtttattcgtttttttagttttcggattttattggggataagatagttagttttggcgatgagaggtacgatgttgatttttttatgtaatgtttttatgaaatttatatttattggtcgtagtttgtcgagagtagttaagggtgggtataggtatagttagggggttatattgtaggggttgtattttcgagtttggttttaggatagttatatatttatgttcgaagggggagatgaagtataggtagtagtgtattcggttgttttggatgttttttcggttgaggtcgtttttattacggaagtattgtttaaattgttggtttatatagtcggtgatgggtttttagttgtgggtaggagggaggtgaggttaggtttcgagtgttgtggtcgtttaggtaaggttttttttagtaggttttatttattattcggtgttgttgatagcgttttcgaatttcggcgtgtttacgatggtgagttttagtttgatttttttttttttaatgtttatcgtgtgttttagaatttttatcgtttggttgatgcgttttacggggaaggggttattggaagggtttttttaatttttagttttttatttttggtagttaggattttcgtttttatttattttggtgttttggttttatttttaggggatttatatcgcgagaatagaatagtgggagttggatttgaaagggagtttttggagaggttttatggaaggggattggggattagtgttagggttttttgggggttatttatttttagtattgagtagttttcggtttttgtataagtttgttaggaagaggttgtggattagtgtggatttttttaggtttgatttatttgtatataggtatagagaaggagttgcgttaggtttggggttttaacgatagagtttggttggttagtgattttagttattttttcgaggagtttggtttatttattagttattatgagtgtgaagttaaagtttttttttatcgatttgcggtgtatttggttgggtagtgtggcgaagtttacgtattgtttgttaatgttttggggataggatggaatagggtagggatataaaggtttttttagaagtttaatattttgttttttattaaatgcggtatgaggagatagtagagggtacggtttttagggtggggtatttcgttggtaaaaataaggggagggttcgtgggtaaaagtttggagataagaaggtaggcgaggtggtggtaggagaaggtatttttggttttaattttagggagggttttgtagggatcgatattgtatttatttcgtggggagatgttaggtcgtagtaggtataggcgatgtttttttttttcgggtagagggtagtaggattgggatttttgggatatatttaaggttttttataagtcggagaagttgggggtttcgatatttattttttcggagagtgttagggggcgggaggttttatttggttcggatttagtcgcgggggcggcggtagcggcggtggcggagtagcgtttatttatagatcgcggcgtcgagtttttttcgttcgcgcgtttaggcgtttagttttcgtagatttttggggtttttggaggggttttacggtcgtatttttcgtcgcgttttggagtcgcgtgaggtgaggtttggatagggtacgtcgttttatcgtggggtcgcggatttgcgaggtcgttgcggagggaagggttgagtttaggcgttggcgggtcgtggcgcgcggggacggggattttatgtcgagtttcggagttcgcggggttatagatttacgtttcgttttttttatatacgtattttgagtcgtttttgggtttgggttcgcggcgatagtagttgttttattaggcggttttggggcgttgttagcgagtttatcgcggcgatttttttaggttcgggggtacgttcggattttaggttcggttaggtcgttagagttcggcgatagcgagggattttggcgcggttttgttttaggttgcgttgtttatttcgttttgcggacgcgggaagtgaggtttggatagggtacgtcgtttattcgggggatcgtcgattttcgaggtcgat

SEQ ID NO: 45 - DNA, 4858 bp, Artificial Sequence
  chemically treated genomic DNA (Homo sapiens)
ggaatttttttttttttttttttttttgaaatagggtttcgttttgttatttaggttaaagtgtagtgtcgcgattttagtttattataatttttgttttttaggtttaagggatttttttattttagttttttaagtagttgggattataggtatgtgttattatattcggttaatttttgttttttttatagagatagggttttattatgttgtataagtcggttttgaatttttgagtttaagtgagttatttgttttggttttttaaagtgttgggattatatatgtgaattatcgtattcggttttaaaaatgtttttttaagcgtaattacgtaatgttagttgtagtttagatttttggatgttaatttaaaatagttttataggaatttagtgtggtggtttacgtttgtaattttagtttgaggtaggtggattatttgaggttaggagttcgagattagttgggttaatatggtgaaattttgtttttattaaaaatataaaaaaattagttgggtatagtggtaggtattcgtaattttagtttttcgggacgttgaggtagaagaattgtttgaatttaggaggtagtggttgtagtgagtttagatcgtgttattgtattttagtttgggtaataagagtaaaattttgttttaaaaaaattaattaatttaggttgggcgtagtggtttatgtttgtaaattttagtattttgagaggttgaagcgggtggattatgaggttaagagatcgagattattttggttaatacggtgaaattttatttttattaaaaatataaaaaaaaaattttaaaaaataaaaaaataaaaataaataaataaattaaaaaaatataataattagttaggcgtagtggtaggcgtttgtaattttagttagtcgggaggttgaggtaggaggagaatggagtgaatttaggaggtagagtttgtagtgagttgagatcgcgttatagtattttagtttgggtaatagagcgagattttattttaggaaaaaaaaaattaattaattaaaaaaatagtaagataaataatattttttttattttagtaaaaggatgaagttagttttttaatgaataaaaataagagattgttgaatgttaagttttatagatagtttagataatatagggagatattatttttatatatatatatatatatatatatatatatatatatatatatatatatatatatataaaatagttgcgtatggtggtatgggtttgtagttttagttattggggtagggttagggggtgggaggttgaggggagaggatgttttaatagggaggttgaggttgtagagagttatgattacgttattgtattttagtttgggtgatatagtaagattttgttttagaaaaaaaaaaaagaaaaaagttaagaatgtatttttgaggaattttattaataaaatgtattaaatatagttaaagagttttttgttatatgttaagtggaaagttatgaagaaagagaagaatagaagtaggaggatattggtttttattttttatttttttaagaagtaagatttattattttttaaaaagtttaaatattggtaaggtaagatataatttttatttataatattgtatttttgtttttaggtaataaattaaatgttagataaaagtataatatttattatttaatttttaggttttagtatagaatttataaatattttgttggttaaggtaaaaaggtgtattgtatttttagagagtttgtagagttttgagtattaattttataatttttatattttaatttatataaagtattattaggttaagaaatagattatatagtaggtataatatttttgggtatgtaaatatgttaaggattaaagtaagaaaagagtaattataggggttatattatatttgttaaaaagtgatttgtttaaaaattaaaaagaagtcgggtgtagtggtttatatttgtaattttagtattttgagaggttggggtgggtggattatttgaggttagtagtttaaaattagtttggttaatatagtgaaattttatttttattaaaaatataaaattaggcgtggtggtaggcgtttgtaattttagttattagggatgttgaggtaggagaatcgtttgaattcggaaggtagaggttgtagtgagttaaaatcgtattattgtattttagtttgggtaataagagtaaaattttgttttaaaaaaaaaaaaataaaaataaaaataaaaaagaaatttagtttatttttttgtgtaatttttaataaattgttgagaagtgattttatataggaattttgtataatttattttgatgcgttcgaggtggtcgttagttgatttcgcggagtttatttttttggttttttcgttttaacgtcgttcgttttttagttaggatgtttgttcgtggttcggttatcggtatcgatttgggtattatttattcgtgcgtcggggttttttaatatggtaaggtggagattatcgttaacgattagggtaatcgtattatttttagttacgtggtttttacggatatcgagcgttttatcggcgacgtcgttaagaattaggtggttatgaattttattaatattattttcgacgttaagaggttgattggacggaaattcgaggatgttatagtgtagtcggatatgaaatattggtcgtttcgggtggtgagcgagggaggtaagtttaaagtgtaagtagagtataagggggagattaagattttttttttagaggagatattttttatggtttttacgaagatgaaggagatcgcggaagtttatttggggggtaaggtgtatagcgcggttataacggtttcggtttattttaacgattcgtagcgttaggttattaaggacgtaggtattattacggggtttaatgtgttgcgtattattaacgagtttacggcggcggttatcgtttacggtttggataagaagggttgcgcgggcggcgagaagaacgtgtttatttttgatttgggcggtggtattttcgacgtgtttattttgattatcgaggatggtattttcgaggtgaagtttacggtcggcgatatttatttgggcggtgaggatttcgataatcgtatggtgagttatttggcggaggagtttaagcgtaagtataagaaggatattgggtttaataagcgcgtcgtgaggcggtcgcgtatcgtttgcgagcgcgttaagcgtattttgagttcgtttacgtaggcgagtatcgagatcgattcgttttacgagggcgtggatttttatacgtttattacgcgcgttcgtttcgaggagtttaatgtcgatttttttcgcgggattttggagtcggtggagaaggcgttgcgcgacgttaagttggataagggttagatttaggagatcgtgttggtgggcggttttattcgtatttttaagatttagaagttgttgtaggatttttttaacggtaaggagttgaataagagtattaatttcgacgaggcggtggtttatggcgtcgcggtgtaggcggttatttttatcggcgataaattagagaatgtgtaggatttgttgttattcgacgtgatttcgttgtcgttgggtatcgagatagttggcggtgttatgattttatttattaagaggaatattacgatttttattaagtagacgtagatttttattatttattcggataattagagtagcgtattggtgtaggtatacgagggcgaacgggttatgattaaggataataatttgttgggtaagttcgatttgatcgggattttttttgcgtttcgcggggttttttaaatcgaggttattttcgatattgacgttaatggtatttttaacgttatcgtcgtcgataagagtatcggtaaggaaaataaaattattattattaatgataaaggtcgtttgagtaaggacgatattgatcggatggtgtaggaggcggagcggtataaatcggaagatgaggcgaatcgcgatcgagtcgcggttaaaaacgttttggagttttatatttataatattaagtagacggtggaagacgagaaattgaggggtaagattagcgagtaggataaaaataagattttcgataagtgttaggaggtgattaattggttcgatcgaaattagatggtagagaaagatgagtatgaatataagtagaaagagttcgaaagagtttgtaattttattattagtaaattttattaaggtggttttggcggcggtagcggcggcggcggtttaggagttttcgggggatttattatcgaagaagtggattaagtttgtatttaagttagcgtaaatttttttgtttttttttttttttttttttttttgtttgtttttttgaaatgtttttgtgttaagtacgagatttattgttggaagtttttggtatatgtaaatgaaaggagaggtgtaataatttagtttaattataaaagttttaaagtttgttttttaaaaatattattcgaggtttttttttaatgtattttgcgtgtttgttgatttgagtatttttgattagttcgtgtatggagatttgtttgagatgagaaattttaagtttgtatatttgttttgtagaagtttggaaatagtaaaatatataggagtttaaattgtttatttttatgtattattttaaaattaaattgaatattgtagtaatgttaaggataggtatattttttgtaaataaatgtataaaatgtaaatgtaaagtaaagttgaaattgattttaaaaaaaaaaaa

SEQ ID NO: 46 - DNA, 4858 bp, Artificial Sequence
  chemically treated genomic DNA (Homo sapiens)
ttttttttttttgagattaattttagttttattttatatttgtattttatgtatttgtttgtaaaaagtatatttgtttttaatattattgtaatgtttagtttagttttaaagtagtatataaaaataaataatttaagtttttatatattttattgtttttaagtttttatagaataggtgtgtaaatttaaggttttttattttaaataaatttttatgtacgaattaattaaaaatgtttaagttagtaaatacgtaaaatgtattaaagagaaatttcgaataatgtttttaaaaaataaattttggaatttttataattaaattaagttgttgtatttttttttttatttgtatatattaaagatttttaataatagatttcgtatttggtataaggatattttaaagaaataaataaaaaaaaagagagagagagaaaggtaaagaggtttacgttgatttgagtgtaagtttagtttattttttcgatggtgggtttttcggaggtttttgaatcgtcgtcgtcgttgtcgtcgttaggattattttggtaaagtttgttgatgatggggttgtaaattttttcgagttttttttgtttgtgtttatatttatttttttttgttatttggtttcggtcgagttagttgattattttttgatatttgtcgaggattttgtttttgttttgttcgttaattttgttttttagtttttcgttttttatcgtttgtttgatgttgtaggtataggattttagggcgtttttggtcgcgattcggtcgcgattcgttttatttttcgatttgtatcgtttcgttttttgtattattcggttaatgtcgtttttgtttagacgatttttgttattggtgatggtgattttgttttttttatcggtgtttttgtcggcggcggtaacgttaaggatgttattggcgttaatgtcgaaggtaatttcgatttgggggatttcgcgaggcgtagggggaatttcggttaggtcgaatttgtttagtaggttattgtttttggttatggttcgttcgttttcgtatatttgtattagtacgttgttttggttgttcgagtaggtggtgaaggtttgcgtttgtttggtggggatcgtggtgttttttttgatgagtggggttatgatatcgttagttgtttcgatgtttagcgataacggggttacgtcgagtagtagtaggttttgtatattttttgatttgtcgtcgatgaggatggtcgtttgtatcgcggcgttataggttatcgtttcgtcggggttgatgtttttgtttagttttttgtcgttgaagaaattttgtagtagtttttggattttggggatacgagtggagtcgtttattagtacgattttttggatttggtttttgtttagtttggcgtcgcgtagcgttttttttatcggttttagggtttcgcgaaagaggtcggtattgagtttttcgaagcgggcgcgcgtgatggacgtatagaagtttacgttttcgtagagcgagtcgatttcgatgttcgtttgcgtggacgagtttagggtgcgtttggcgcgttcgtaagcggtgcgcgatcgttttacggcgcgtttgttgggtttaatgttttttttgtgtttgcgtttgaattttttcgttaggtggtttattatgcggttgtcgaagtttttatcgtttaggtgggtgtcgtcggtcgtggattttatttcgaagatgttattttcgatggttaggatggatacgtcgaaagtgttatcgtttaggttaaagatgagtacgtttttttcgtcgttcgcgtagttttttttgtttaggtcgtaggcgatggtcgtcgtcgtgggttcgttgatgatgcgtagtatattgagtttcgtgatggtgtttgcgtttttggtggtttggcgttgcgagtcgttgaaataggtcgggatcgttatgatcgcgttgtgtattttgttttttaggtaggttttcgcgattttttttattttcgtgaggattatggaggatattttttttgggaagaaggttttggttttttttttgtattttatttgtattttgggtttgtttttttcgtttattattcggaacggttagtgttttatattcgattgtattgtggtattttcgaattttcgtttaattagttttttggcgtcgaagatggtgttggtggggtttatggttatttggtttttggcggcgtcgtcgatgaggcgttcggtgttcgtgaaggttacgtagttgggggtggtgcgattgttttggtcgttggcgatgatttttattttgttatgttggaagatttcgacgtacgaataggtggtgtttaggtcgatgtcgatagtcgggttacgggtagatattttgattgaaaggcgagcgacgttaggacgggaaaattagggagatgaatttcgcggagttaattaacggttatttcgaacgtattagaataaattatataagatttttatgtaagattattttttagtaatttattaggaattgtataaggaggtaaattggattttttttttgtttttatttttatttttttttttttgagatagagttttgtttttgttgtttaggttggagtgtagtggtgcgattttggtttattgtaatttttgtttttcgggtttaagcgatttttttgttttagtatttttagtagttgggattataggcgtttgttattacgtttaattttgtatttttagtagagatggggttttattatgttggttaggttggttttgaattattgattttaggtgatttatttattttagttttttaaagtgttgggattataggtgtgagttattgtattcggtttttttttaatttttaaataagttattttttggtaaatatagtatggtttttatagttattttttttttattttgatttttaatatgtttgtatatttaagagtgttgtgtttgttatataatttgttttttagtttgatggtgttttgtgtagattgagatatgaggattatgggattagtgtttagaattttgtaagttttttggaaatatagtatatttttttgttttagttagtagaatgtttgtgagttttgtgttgaagtttgggggttgagtggtagatattgtgtttttatttgatatttgatttgttgtttgaggatagagatgtagtgttatgggtgggagttgtgttttgttttattagtgtttagattttttaaaagataatggattttattttttgaaagaataggagatgaaaattaatgtttttttgtttttgtttttttttttttttatagttttttatttggtatatagtagaaaattttttggttatatttggtgtattttgttggtggaattttttaagaatgtatttttgattttttttttttttttttttttgagatagagttttgttgtattatttaggttggagtatagtgacgtgattatggttttttgtagttttaatttttttgttaaggtattttttttttttagttttttattttttggttttgttttaatagttgggattataggtttatgttattatacgtagttattttgtgtgtgtgtgtgtgtgtgtgtgtgtgtgtgtgtgtgtgtgtgtgtgtgtgtgtgtagagatggtgtttttttgtgttgtttggattgtttataaaatttgatatttaatagttttttgtttttatttattgagaaattggttttatttttttattgaaatgggagaagtgttatttattttattgtttttttaattaattaatttttttttttttgagatggagtttcgttttgttgtttaggttggagtgttgtggcgcgattttagtttattgtaagttttgttttttgggtttattttattttttttttgttttagtttttcgattagttgggattataagcgtttgttattacgtttggttagttgttgtgtttttttggtttgtttgtttgtttttgtttttttgttttttggggttttttttttgtatttttagtagaaatggggttttatcgtgttagttaggatggtttcgattttttgattttatgatttattcgttttagttttttaaagtgttgggatttataggtatgagttattgcgtttagtttaaattaattgatttttttgagatagagttttgtttttgttgtttaggttggagtgtaatggtacgatttgggtttattgtaattattgttttttgggtttaagtaatttttttgttttagcgtttcgagaagttgaaattacgggtgtttgttattatgtttagttaatttttttgtgtttttagtagagatagggttttattatgttggtttagttggtttcgaatttttgattttagatgatttatttgttttaggttgggattataggcgtgagttattatattgggtttttatgggattattttaagttaatatttaggaatttaaattataattagtattacgtagttacgtttaagaaagtatttttggggtcgggtacggtggtttatatgtgtaattttagtattttgggaggttaaagtaggtagtttatttgagtttaggagtttaagatcgatttgtgtaatatggtgaaattttgtttttatgaaaaaagtaaaaattagtcggatatggtggtatatgtttgtggttttaattgtttgggaggttgaggtgggaggattttttgaatttgggaggtagaggttgtaatgagttgagatcgcggtattatattttagtttgggtgatagagcgagattttgttttaaaaaaaaaaaaaaaaaaaagaatttt

SEQ ID NO: 47 - DNA, 7040 bp, Artificial Sequence
  chemically treated genomic DNA (Homo sapiens)
atatagtttggtttgagggaagatgttagtatgtgattataaattggataaaattatttaagatagtcgtattttaattagattaaattttaaaattttaaatatttataagtattttatgtttttaaaaatatgagaaatttgtaagatattattaaatttaaaggtttttaaaattagtttgaaatatatttgtatgttttaaaattttttgtgaagtttagttgtatttagataagtaaaattttatttacgtatttttagagttaaaatataaaatttaagcgattagggtaaagtggaagtaattaattttaattttttcgtatggaaatagatagtgtgcgttggttatatttagggacgtgttttatgtaatttataaattaagatttgtttcgattatattatatggattatataaaaattaaagtagttgtatatgtattttattgatatagaaataagtttatgttatattgttaagtataaaatttaaattttagaatgttaatagtataattttattgaagtaaaaaaaaattgatatgttttttaagtttgagtttataatttttgtatgggaatttttagtaaagcgtatatatttatttatagtttaattttttagttttaaaaaaggtaaaagtgaaatttcgataatgaaatttacggttgtaattagtaatattatatttgtacggttgtaatattcgcgtttttcgtattgtaatttttggaatttattgtaatttttcgaattcgttgttattcgagattttttaatttggcggttttttgttaggattcgggcggtcgttaagagtgcgtaggcgtaagcgcggtcgtcgtcggtggggttttatgtgttgttgagattgttgttgagtttttgggtttttttaagattgttttttaaaagacgacgtgatgattttaaagagaaaggaaaatttgttgcgtacgtagaagggtaggttgggcgtattttgagcgtttttcggggatcgacggtttcgtttacgtgttttcgggtattagcgcgtttaaagttcgtgtattaggaaacgtataaaagtattagcgggcgagttcgagggcgagtttacgggtagttaggaggcggcgagggcggtttgttttttagagattggggaattaagaaaggtagagttattttttcggttttagcgtagtaagtgtaggaggtagggagggcgtagcgtttcgtcgtttacggtattcgtggaattcggtgcgcgtttcgggagttggggcggtttaggtttagcgtgtttagaaagttaattacgttggttaggaggacgtttttttattattcgcgatttttaggttttgattaaagttaaattaaaaggagttattcgtttcggtatttgttgttatttttgtgataaatatggtgtttgatacgaaagtattttaatagttatgttgttaattaaagaataaaatacgtaaagtttgtgcgttaagaatacgagagtatttcgttttttaggaggtgtagtttattttgttttttttgttttatatataattttaaggagaattttttgttattaatatattttgttttttgtttttgggggatgatataggtatattgtatttgattagattagtgttaattttttatttacgtttttattatatgttgtattattaatatagtaggattttatatttttaatcgtaaaatttaagagtagaaaaatatttaaattgtatgttagtttaatatgaaaacgagttattttagttttgataggatatttttaaattaatattatttaataaatatgttttttattcgtataagtttatatatatggttttttaaatgagttttataaataataattagtattgaggttttgatttaagtatttgaaattttgttattttttataataattttgagatgggtatattttttttattttgtagataaggaaataggtattgggatggtaagaaatttaggttatttggtttttaatagttttttattattatgttaaagttttatttatttttgagatttaaaatattatatagtgtatatatatttggtaattaaattaggattaaatattaaagttaagggttaagtatagtgttttgtaattttagtattttgggaagttgaggcgggtagatcgtttgattttaggagtttaagattagtttggaaaatatggtgaaattttattttaataaaaaaatataaaaatagttgggtgtggtggtgtgtgtttgtggttttagttatttgggaggttgaggtgggaggatcgtttgagttaaggaggtagaggttgtagtgaattaagattatattattgtattttagtttgggtgatatagtgagacgttgttttaaaaagaaaaaagtaaaattaaagtaagaatataataagaaatatgtttggtattgtgttacggggagaaaaaattaatagggagataaattttgtttttagggtaagtgtaatttgttgagtaaaagaaatattttaagatattttaaaaaagaaaataaaggttgttgtaaattggatatttaattaaatatttttgggtagattggtagatgatagatttaatgaatttggggtttataaatatatagaatgttatatttttattaatattttatgttttgggtaaagagtaaaattaattttgaaaatgaattgtgtatgtaattattttaaaaataaagattatataataagttatattattttgtattatgtgtaatatttagggggttaaggtatttttattttgttaatatttatagtatttttattatataattattttagagttttgaattataattttaattaggtgatagttattgagtaaattttgtaatgtaaatttattatagaatataattgtattattttttttttatttattggtatttttttatatttggggtttgatataattgtatataataatttttttattaaaatattttatagagttggttaggtatggtggtttacgtttgtaattttagtattttgggaggttgaggtaggtggattatttggggttaggagtttgagattagtttggttaatatggtgaaattttatttttattaaaaatataaaagttagttgggtatggtggtatgcgtttgtaattttagttattcgggaggttgaggcgggagaatcgtttgaatttaggtggcggaggttgtagtgagcggagatcgtgttattgtattttagtttgggtaataagagcgaaattttgttttaaaaaaaaaaaaaagattgaggtttaagtaggttaaatattatatatatattagattatatattaagttatataggttgtatagaatagaaattttattttagggttttatagattttaaattgtttttgtaaatggtttatgtttattaatttatttttttaaagttaatatattttaaaaatagaattgttattattaaaatgtggttatatataatttaatatataagtgttttagaagaagggaattttattatttgattttttaaaatatagattttaatatttttgtgtgtgtgtgtttttttatgaatatggtaatattattggttttttttttaaagatatggtatgaaattaattttttgtttagagttaggattttgttttattatttagtttggtgtgtagtggtacgattatagtttattatagttttaaattttttagtttaagttttttttcgttttagtttttaaagtagttaggattataggagtgtattattatatttagttaattttattattattttttgtagaggtaggttttaaatttttggttttaagtggtttttttattttagttttttaaagtattggtattataggtataatttattgtatttggtagaaaattaatttttattataaaaattagaaagaaagattttattgtttgatggttaatattttgaattttattttaatttttggttttttatattatatgtaggtattagtgattttgtgttatttttatttttttagatttttttttttttataatttttttatatgtgttattatttgaagttttgattatagttttgaattatttttatttttttgttttttttaattttggtttaaaatttcggtaatttatttgttacgaagtttagaattttttttgtaagtgagttgatcggttgggttaaatcgttttggaagggaaggattgttaggaagttagtatgttgttaagatgttttgttaatttgttgtgtaagttgtatagagtgttaggggatttttttttttattgatgaatttaggtgtgtgttatgatttgtattagtgattttatttggattgattaaggttgtaattttttatttatatgaatgttgtatttagtttttttttgtaattggttaaataaatgtttgttgtttgtattttaatttttagttaatatttgttggaagtgatttaatgtagttggagaatgatattaataattattatagtttgtaaagtgtgaaataattttattgtgttttgtggtttttttagtttgaggattgataatgtgtagcggatgagatttgaaaaaaacgtattttattataatttaagaaataatgtaaaagaggggtgagttttgaggtagttttatgttgtttgtttggtatgagtttgtttttataagaatttattttaagtgtggaagggaaatgtttttatttgaaagggatagttgtgttttatttcggtttttttttttatttgataaaaatttttgttgagtgatagtatagatgtagtttatttggaataagtgaaggaaaaggagaaaagggatgaggtggagcgaaggagtagttagttatgtttttaaagtttcgcggttttttttagtttttttatttaatttagcggttttggtgtttttttgtaaagtgagatgttttcgtttttggttttacgtttttattttcggagcgagttttttttatcggtggacgcgcggttttgtagtagttttttagagttatttgcgaagttgtttttgggggttatttttttcgggtttcgcggttgtcgcgtcggttggtttggtgttttattgattgggagtaggtgtgtttgttgtagaggttgggagttggagggtttggttcggtgtataaggcgatttatcgcggtgtttttgtggttataaagtaagtgaataagtgtattaagaatcgattagtatttcggcggagtttttgggttgagtttaacgtagtaaggttgcgttacgataatatcgtgcgcgtggtggttgttagtacgcgtacgttcgtagggtttaatagtttagggattattattatggagttcggtggtaacgttattttatattaagttatttatggcgtcgtcggttattttgagggggacgtaggggagttttattgtcgtattggaggatagttaagtttgggaaagtgttttaagtatttattagatgttgtgaacggtttgttttttttttattcgtaaagtattgtgtatttggatttgaagttcgcgaatattttgattagtgagtaggatgtttgtaaaattagtgatttcggttgttttgagaagttggaagatttgttgtgtttttagatatttttttattttttaggaggtatatatatttatcgcgtttcggagtttttgaaaggagagggcgtgacgtttaaagtcgatatttatttttttgttattattttttggtaaatgattattaagtaggcgtcgtattcgggggagcggtagtatatattgtacgcggtggtggtttacgatttgcgttcgttttttttcgttgtcgttttcgaggattcgtttttcgggtagcgttttggggacgttatttagcgttgttggagatttagcgcggcgtagaggtcgagcgcgcggttgtttttggtggattttatttttttgaaagttgaattcggttgattgaaaatttggttaagataagtttttgtttgattttatttgtttttaaaggaagtggagatgtcgaagaaaatatatttgtaggatggagttttagaaaataaagttattaaaaatttttttagtttttagtgttttttttaggatatattagtaaagttataagtttagtatttgttgttttagtattgttagtaattaattttatttatatagttatgtgttttgttttttattgttagtattttatttatttaaatttgttattgataaaagtttgtttaaaatagaattttattgtagaaatgttaaaattttttataaatttatatatattttatatttattatataaattttaattattaatggtgtagttgtttttatattaaattagtaaaaatttttaaaaaaataagtaatgtttttttattattttttttagtaaaattttttgtttgtaatgatttttatttataaaagttatatattgaggtatatttatatttaaaggaattatattataaatgatttattgtaatatttttaatttgtgtattgtaatgagtagaaatattttgttaaaatatttttaaattgggttatttttatttggtattgggatttagaagtagaagataaagattatatgatgtgagaggaaaatgtaggagtagaaggtaaagattatatgatgttaggaattatgaaatttaatatttggatggaagagaatagataaatagaattagattgtttattttagatattaaaataatggatgttggtatataggatttaaaggagaaggtgattggattttgttattgggatagttttgatttttttttagtaatagtagtttttgtgtatggtggaaagtaaggttgatgtaatggttggtagagggaatggtaaggttttgaagtagaggttgtgtatgtattgttaaggagggagaggtaggaagtttaaaagggggttagagatatagaaatgtt

SEQ ID NO: 48 - DNA, 7040 bp, Artificial Sequence
  chemically treated genomic DNA (Homo sapiens)
aatatttttgtgtttttgatttttttttaagttttttgtttttttttttttaatagtgtatgtatagtttttgttttagggttttgttattttttttgttagttattgtattagttttgttttttattatgtatagaaattgttattgttaaaagaaagttaaagttgttttaatgataaaatttaattatttttttttttaaattttatgtattaatatttattgttttgatgtttagagtgggtaatttagttttatttgtttgtttttttttatttaaatgttaaattttatgatttttgatattatataatttttattttttatttttatattttttttttatattatataatttttattttttatttttgagttttaatattaggtaaaaatgatttagtttagaagtgttttagtaaaatgtttttatttattgtaatgtataagttaaagatattataataagttatttatgatataatttttttgaatgtaaatgtattttagtgtatgatttttatgagtgaaggttattataaataagaagttttattggggggagtagtaggaaagtattatttatttttttaaaagtttttattgatttggtgtgggagtaattatattattaatagttggaatttatgtggtaggtatgggatatatatggatttatagaaaattttgatatttttgtagtggagttttattttggataaatttttattaataataaatttaaataaatgaaatattagtaatggaaagtaaagtatatgattatatgaataagattagttattaatagtattgagataataggtattagatttgtagttttgttaatgtgttttagaaaaagtattggagattaaaggagtttttagtaattttattttttaaaattttattttataaatatgtttttttcgatatttttattttttttaaaaataaatagaattagataaaaatttattttgattaggtttttagttagtcgagtttagtttttaaagaggtgagatttattaaaagtagtcgcgcgttcggtttttgcgtcgcgttgggtttttagtagcgttggatgacgtttttaaggcgttgttcggggagcgagttttcgaaaacggtagcggagagggacgggcgtaggtcgtaggttattatcgcgtatagtatgtgttgtcgttttttcgaatacggcgtttgtttggtagttatttgttagagagtgatggtaaaggaataaatgtcggttttaggcgttacgttttttttttttaggagtttcggggcgcggtgggtgtatgtgttttttagagggtaagagggtgtttggaagtatagtagattttttaattttttagagtaatcgaagttattaattttatagatattttgtttattgattaagatgttcgcgggttttaggtttaagtgtataatgttttgcgagtggaggaagagtaggtcgtttataatatttagtgagtatttgagatatttttttaaatttaattgttttttagtgcggtagtgaggtttttttgcgttttttttagggtggtcggcggcgttatagatgatttggtgtaaagtgacgttgttatcgaattttatgatgatggtttttaggttattggattttgcgggcgtgcgcgtgttggtagttattacgcgtacgatgttatcgtggcgtagttttgttacgttgagtttagtttagaaatttcgtcgagatgttagtcggtttttggtgtatttgtttatttgttttatggttataggaatatcgcggtaagtcgttttgtatatcgagttaaattttttagtttttagtttttgtagtaagtatatttgtttttagttaatggagtattaggttagtcggcgcggtagtcgcggggttcgaggaagatggtttttagaagtagtttcgtaggtagttttgagggattgttgtagggtcgcgcgtttatcgatggggaaaattcgtttcggaggtaggggcgtagggttaggggcgagggtattttattttgtagggggatattagggtcgttggattgaatgaagagattaggggaaatcgcgggattttggaaatatgattgattattttttcgttttattttatttttttttttttttttttttatttgttttaaatgagttatatttgtgttgttatttagtaagagtttttattagatggagggagaaatcggaatgaagtatagttattttttttagatgaaagtattttttttttatatttgaagtgaatttttataaaaataagtttatgttagataaatagtatggagttgttttagaatttattttttttttatattattttttaaattataataaaatacgttttttttaagttttattcgttgtatattattagtttttagattaaagagattataaagtataatgaaattgttttatattttgtaggttgtaatgattgttagtgttattttttagttgtattaaattatttttagtaggtattggttaagagttaaaatgtaaatagtagatatttgtttaattaattatagggaaaaattaggtgtaatatttatatggataaaaaattgtaattttaattaatttaaatagaattattgatataggttataatatatatttaaatttattagtggaaaggagaattttttgatattttatgtagtttatatagtaaattagtaagatattttagtaatatattgattttttaataattttttttttttaaggcgatttggtttaatcggttagtttatttgtaagagagattttagatttcgtagtaaatgagttatcgaagttttgaattagagttgggggagataaaagaatagaaatgatttagagttgtgattagggttttaaataataatatatatgggagaattgtagaagaggaaaaatttgaagaaataaaaatggtataaaattattggtatttatatataatgtagaaaattagaagttggaatgaaatttagggtattggttattagataataagatttttttttttgatttttataatgaaaattaattttttattaagtgtagtgagttatgtttataatattagtgttttgggaggttaaggtggaagggttatttgaggttaagaatttgagatttgtttttataaaaaataataataaagttagttgagtgtggtggtgtatttttatagttttagttattttggaggttggggcgggaggagatttgaattgaggagtttgaggttatagtgagttatgatcgtgttattgtatattaggttggatgatggagtaagattttgattttaagtaaaaaattaattttatattatatttttggaaaaaggattaataatattattatatttatgagaaaatatatatatataaaagtgttaggatttatattttaaaaaattaaatggtaaagttttttttttttaaagtatttatgtgttaggttatgtgtaattatattttaatgatagtagttttgtttttgaagtatattgattttgagaaggtaaattaataaatatgaattatttatagaaataatttgaggtttgtgaagttttggaataggatttttattttatataatttgtgtggtttagtatgtgatttagtgtgtgtataatatttaatttgtttgagttttaattttttttttttttttgagatagagtttcgtttttgttgtttaggttggagtgtaatggtacgattttcgtttattgtaattttcgttatttgggtttaagcgattttttcgttttagtttttcgagtagttgggattataggcgtatgttattatgtttagttaatttttgtatttttagtagagatggggttttattatgttggttaggttggttttaaatttttgattttaggtgatttatttgttttagttttttaaagtgttaggattataggcgtgagttattatgtttggttaattttatggaatattttagtagaaagattgttgtgtgtaattgtgttaaattttaaatataaaaggatgttaatgaatagagaaaaagtaatataattatattttataataaatttatattgtaaaatttatttagtaattgttatttagttaggattataatttagggttttgaaatggttatataataggagtgttgtgaatattagtagaatgagagtgttttaattttttagatattatatataatgtaagataatgtgatttattatataatttttatttttaagataattgtatatataatttatttttaaagttggttttattttttatttaaaatataaggtattagtgaaaatgtggtattttgtgtatttataaattttaagtttattagatttattatttgttaatttgtttaagaatatttaattgaatatttaatttataatagtttttgtttttttttttaaggtattttaaaatattttttttatttagtaaattgtatttattttgaaagtaggatttatttttttattgatttttttttttcgtaatatagtgttaaatatattttttattatgtttttattttaattttgtttttttttttttgagatagcgttttattatgttatttaggttggagtgtagtggtgtgattttggtttattgtaatttttgtttttttggtttaagcgatttttttattttagttttttaagtagttgggattataggtatatattattatatttaattatttttgtatttttttgttgagatggggttttattatgttttttaggttggttttgaatttttgaggttaagcgatttgttcgttttagttttttaaaatgttaggattatagggtattgtgtttggtttttaattttaatgtttaattttgatttggttattaaatatgtgtgtattatgtaatattttggattttaaaaatgggtaaagttttagtatggtggtaaaaggttattaggggttagatggtttgggttttttattattttagtgtttgtttttttatttgtaaaatgaggaaaatatgtttattttaggattgttgtgaagagtaatagagttttaaatatttagattagggttttaatgttaattattatttataaaatttatttaaaaaattatgtgtatgggtttatacgaataagaaatatatttgttaggtagtattggtttaaaagtattttattagggttgaaataattcgtttttatgttaaattaatatataatttgagtatttttttgtttttgaattttgcggttaaaggtataaaattttgttgtattaatggtatagtatgtagtaaaaacgtgggtggaaggttaatattaatttgattaaatgtaatatgtttatgttattttttaaaggtaaagagtaaaatgtgttgataataaggaattttttttggaattatatatgaaataaaggagataagataaattgtattttttgaggagcgaaatgttttcgtgtttttagcgtataggttttacgtgttttgttttttgattggtagtatgattattaagatattttcgtattaaatattatatttattataagagtaataatagatatcggaacggatagttttttttaatttgattttaattagagtttgaggatcgcggatagtgggagaacgtttttttgattaacgtggttggttttttgggtacgttgggtttgagtcgttttagttttcggggcgcgtatcgggttttacgggtatcgtggacggcggggcgttgcgttttttttgttttttgtatttgttgcgttggggtcgaggaggtggttttgttttttttgattttttagtttttggaagataagtcgttttcgtcgttttttggttattcgtgggttcgttttcgggttcgttcgttggtgtttttgtgcgttttttagtgtacgggttttgggcgcgttggtgttcggaagtacgtgggcgaggtcgtcggttttcgaaagacgtttagagtgcgtttagtttgtttttttgcgtacgtaataaatttttttttttttttagagttattacgtcgttttttggaaggtagttttaaaaaggtttagaagtttaatagtagttttaatagtatataaaattttatcgacggcggtcgcgtttgcgtttgcgtatttttgacggtcgttcgagttttggtaggggatcgttaggttaagagatttcgggtgatagcggattcgagaggttatagtggattttagaggttatagtgcgaagagcgcgagtattgtaatcgtgtaagtgtggtattgttggttataatcgtggattttattgtcgaaattttatttttgttttttttaagattaaaaagttaagttgtagatgaatatatacgttttattaaaaatttttatataaagattatagatttaaatttgaaaaatatattaatttttttttattttagtgggattatattattgatattttaaaatttgaattttatatttagtaatataatatagatttgtttttatgttagtaaagtatatatatagttattttaatttttatatggtttatataatatggtcggggtagattttagtttgtggattgtatggagtacgtttttggatgtgattagcgtatattatttgtttttatgcggggaggttggggttggttgtttttattttgttttgatcgtttgggttttgtattttgattttggagatacgtaaataaaattttatttgtttaaatatagttaaattttataaaaggttttaagatatataaatgtgttttaaattggttttggaaatttttgaatttaatgatattttgtaagttttttatgtttttaagaatataaaatgtttatagatatttgaaattttgaaatttgatttgattaaaatgcggttgttttgaatgattttgtttaatttatgattatatattggtatttttttttaagttagattatgt

SEQ ID NO: 49 - DNA, 6246 bp, Artificial Sequence
  chemically treated genomic DNA (Homo sapiens)
ttttgtatatttgtattttatataataatattttgtgtaatttttttttaaatgtagaatattgatattggagaatgttttttatatattttaagtgaaaaaggagtaaaaattatataatgtattattttatttttttaataaaatgtaaatgtgtatagtaaagatatagaggtgttatagtgttagggaaaaggggtgtaagattagtgtttgttttttattttttgttttgtttataaattttttatattaaaaatataaattttaaatgaaaataatggaataaatataaatttttattttataattaattaaaatgatagtaattgaattttttaaagttttaaatttattaaaatgggagaaatggatgatagtattagcgtttgaaaggtggaaagtggagggacggtgggtagattatttggttgatttaagaaaattgaattttaggttagttgagatttatgttgatttatagaattttaagaatgtttaggaattgggagaagattaaggatattagaagagaagggggtgaaaataaggaaagttgttgaaatttagtttaagaaatagttagatatttatttttgtttattaaagtcgagtgatttttttgtagtagggtttttttcggataggatatttggattaagaaatattagatatagtagagggcggtcgaaatatgttgaaattaggaatagttaatagatgttgaggtttttattttagttttttttttatttttgttgttggaatgttggagatagggagaattttttttgcgcgagttgatttgtttgttaaaaaaacgataaagaaattgttataggaggttttttaagtgaaaatagttagttatttgttttataggaaatagtttttttttatataattatttttagagatttttgttttaatatgtgtaggtaatttaggattatttaacgtgtaaggaaagtttataagatggaaaaaaaattttttttgaggtagggtttggttttgttatttaggttggagtgaagtggtgtgattataatttattgtagtttcgatttttgagtttaagtgatgtttttatatagttttttaagtagttgggattataggtatgtataattatgtttggttaagttttttttatgttttgtagaagtaaagtttttttatgttttttaggttggtgttaaatttttgggtttaagcgatcggttttttaaagtgttggaattataggggtgagttatcgcgtttagtttaaaataattttttaaagaaaatttgtagaaaataaagattatgtatgaaaaaggaaatttagaagatattaatgaaataagaatatagtgttgttagcgtgtatgtgtatatgcgtatatatatataaagaattaaatatttttaggaagataaagttatgagaatattttagagaagagaaattttttaaatggaaaatagaataaaaagaaaattaaaggataagtttaagaggtatatagttaaaaaaaatggtagttttaataagagagaataaagaagaaaagttataaaatgttttaatttaagtgtgaatataaaaatatattatttttatagtaagtgagaaaaatagggtgtaaaaggtgtatatgatgttattttatatgtagggataagggaaaataagattatatatttatagttgtttgtatttatataaattaataggatattaaaaaaaaaaaaaaataatatttaagaaaaatagttatttgtgagggaaggtggagattttattgaattttttatatatatagttgatttttgaatagtaggttttgaattgtatagatttatttatttacggatttttttttgtttttgttatttttgagatgataagatcgattttttttttttttttttttcggtttgtttaacgtgaagatagtgacgttgaagatttttgtgatgttttatttttatttaatgaataggaaatatatttttttttttttttttgtgatttttttaataatttttttttttttttttttttttttttaagacggagttttatattgtcgtttaggtttaagtgtagtggcgcgatttcggtttattgtaagtttcgtttttcgggtttacgttatttttttgttttagttttttgggtagttgggattataggcgtttattattacgttcggttaatttttttgtatttttagtagagacggggttttatcgtgttagttaggatggttttaattttttgatttcgtgattcgtttatttcggttttttaaagtgttgggattataggcgtgagttatcgcgttcggtttataaataatttttaaaagatagtaagggatatagtagggtagtaagtgttttatttataagaggagtagtaatgttagaggtttatagagtacggatttttagcgttgtcgttttatataattagtttttttgatttttaaaattatttgtattcgtaatttttttaaaaataaaaatttaaaaaattaaatttttttatttataaaaataatttttttaggttttattttttttgattgggtattatgtttttgttaacggagatttagagtttagagaaattcgaaaaagtaattttagtttttttaggatgagttggtcgggaggaagggaggttttaattttagcgtttcggggttagagtaaagcgaagaggttttttatggttataagcgggcggtttacgtagcgtattgtaggtaggtgcgagttatatgcgttaagtgttcggagcggttttttggtagttagtgttaattaaaattattcgtacgggagtggattttcgttgataatttagaaataagtaatagattttttgatgtagttatttgtgtcgcgttttttcgtatcgttcgttacgttttggtttttggagattattttttagggtaggggttgtcgttcggtcgggttcgcggggtttttcggtttgatatggtcggtgttggagcggtacgtgcgcgtttcggtttttcggtcgttttcgtttttcgtcggtgcgtatcggcgttcggggagtcgttggttcgggtgtttagtcggtttttgttttgtttggcgttcggatcgttatttttgtcgttttttcgttagttttcgtagtttttagattggtcggtttgcgcgtttatttttgtttttcggatcggttatcgtcggaggtcgcggaggagggttcggtcgcgtagatttcgtttatcgggtttatttttcgttatataaggttatttttttattttcgcgggttatcgtcgtcgtaatcgtcgcgttagcgtttttttttacgcgcgggggcgtttttgtttatcgttttcggtagggtttttggtggttatgggggataaggggcgttgatttattcgggcggggtttcgggagttgtatagattaaggtagtttttcgtttttttttttattacggagattttgtgggagatgtcgtgggttttttattatagattaggaaataggttcgtagaggggttatacggttaagtagcggtattttaggtattgggggttttcgaggggaaggggtagatttttgggagttagagttagtagttgggttgggaagtttcgagtgtggatagagagggtgggaatgacgttttttgtgggaagagagggtgggtaagtttgggatgtttttgagcgggaatttagtatgttttgtgaggagggttataagtatatttttgtgaggaggttgagttttatcgaggataggacggagggagtttgagtaggtagagagggggtttggggaggcgttggttcggggaggaagtgggtaggggagaaattttgatattaatatttaataggtaaatgtcgtggtttttgttgtgggggtttttggaggatttttaggaaaacgagggaagagtaggaaaaggcgatatggttgtaggggttaagtttaggagtcgttttttatagtatttattttgtagaagggaaatttgaggtttttagacggtaggggttgattttgtagagattggtgagtaaaggggattattttaagttttagtggtattaggaatatttataatttttgatttggattaaggttgttagtttggtttagttaagagttttttagaaggatggtttatatattttaaattaaaggggttagatacgtgtatattatttttagttattttggaagttgaggtggggggatcgtttgagtttgggagttggaggttagtttaggtaggtaatatagtgagattttatttttaaaaaaataaaataaaataaaataaaaaaatattaaaaaagtttttagaaagatttttgaatttttttggattttttagtggagatttggaaatttgaattttgataattttttttatagtggggttaaggaggaattaggtaagttaaaagaagtgaattttatttttttattgtttgtttgaattttgtatttaagtaagtgttatttaagtaatttaagagattggtttatcgaaaaaataaaattttttaaatttttatagttggtagattgtggttatagttatagtgtattaagattatttgtttagtatttttggtgatttaaaagggtttgaggataggagtttagagttgggttagttgtttaggtatttagggttgttataggtaaaattgttggaatttagggtagtattgtaaatgttacgtcgtttttagggttttttgtttgtcgttggaattaaatttatttagattttggaaattttgttttggattttttttaataagtttatgagaaattaaatttttttttttatgcgatattggattttttataaagtaaaattaagatgagtaaagatgtggtttttagatagtgtttgaaaaagtagagattatggtgttaggcgttattatttgggtttataaaagttgttataagacgttaaggttataagttatttagtttatgtattcgttttttaatttttttttgttggtattgggttttatggcgtttttgttgattacggttattgtttttatttgttttggcggttttgtttttttaggttttgtgtttttttttatagtttttagggagtttattgaggagttggttaatattatttagaattagaaggtgagtgtcggttagttagggttttagttatgagggttttagggtgggtgatttttaagatgaggttatgagtaggttgggtttggttttaagatgtttgtaggttaggaaaaatttttatggattaaggttcggtttagttatgagggagagaggagttgggttggggggtttagtattgtggatggatttatggaggtgtttggtagattttttagggattatttgtttttttggtttggttttgtttgttattgttagtttttatttagttatttttgaatagaggatagtagagaagggttagtatttttttagaattatgtggtatttgttaattggattttgattataataatgtagttattttttttagtattattataggttcgtttttataggaggattttttagtagagttcgttttttgttttattagtaatagtttatatgtttgagtattgtttatattaggtttggtgtacgtgttttatgtgttattttattattgttagttattttaagaggtaggtacgatgaatttattttgttaaggtttagtgaggttaagtgatagaggttggatttaagttaggtttggttaatattagagtgtttatgtttttaattgtagtgtttttttattattagaaggtagggtatttaatatattagatttttatcgttttttatttgatttgttttggttaatagtggtttaggttatttttattttattcgtttttattttggtttttttcgtaggtttttgtttttttgttttgattatggtaagttttgtatgtagtttgttttttattagtggtgttaattttttttttttagttttaagattttaaatagtgggattttatttttatgtttgttgtttaaagtagaaaacgaagtttaggaatgttgaggggttgttaggtttgtttttgtgttatattagggatgtttgtggggtttgtgttggggtagatttggtttgggttgttagggtaggtttataatttttgttagtattttgtttattgttattttgtttttatagg

SEQ ID NO: 50 - DNA, 6246 bp, Artificial Sequence
  chemically treated genomic DNA (Homo sapiens)
tttgtgggagtaaagtgatagtgagtagagtgttggtaggggttgtgggtttgttttggtagtttaggttaggtttgttttagtataggttttataagtatttttggtgtggtatagaggtaggtttggtagttttttagtatttttgagtttcgttttttgttttgaatagtaggtataggggtgaggttttattgtttagggttttggagttgagagaaaaaaattgatattattagtaagggataagttgtatgtaaggtttgttatagttagggtaggaggataggggtttgcgggaagggttagggtggggacgagtgaagtaggagtggtttgggttattgttgattaagataaattagatgggaggcggtggggatttggtgtattaaatgttttgttttttgatggtgagggaatattgtagttaggagtatggatattttggtgttggttaggtttggtttgaatttagtttttgttatttaattttattgaattttagtagaatgggtttatcgtatttgttttttgaggtggttggtagtgatgaaatgatatataaagtacgtgtattaggtttggtgtaagtagtgtttagatatgtgagttgttattagtggggtaaggagcggattttattaaggaatttttttgtaagggcgggtttatgatggtgttggggagaatggttgtattgttatggttaaaatttagttggtaaatgttatatggttttgggagggtgttggtttttttttgttgttttttgtttaggaatggttgagtaggagttggtagtggtagataaggttaggttaggagagtaggtagtttttggggagtttgttagatatttttataggtttatttatagtgttgagttttttagtttagttttttttttttttatggttgggtcgggttttggtttatggagattttttttgatttataggtattttaggattaggtttagtttgtttatgattttattttgggaattatttattttggagtttttatagttaggattttggttagtcgatatttattttttggttttgggtgatgttgattagttttttaatgagttttttgagggttgtagagggaggtatagggtttggggaggtaaagtcgttaaggtaagtgagagtaatgatcgtggttaataaaagcgttatgaggtttagtgttaataggagaggattgaggagcggatgtataggttgggtggtttgtggttttggcgttttgtggtagtttttataggtttaagtggtgacgtttgatattatggtttttgtttttttaggtattatttagaaattatatttttatttattttgattttattttgtggaaaatttagtgtcgtataaaggaaagagtttgattttttatggatttattgagaagggtttagggtagagtttttaagatttgggtgggtttaattttagcggtaggtaaggggttttgagagcggcgtggtatttgtaatgttgttttgagttttagtagttttgtttgtgataattttgagtatttggatagttgatttaattttgagtttttgtttttagatttttttgggttattagaagtgttgagtagatagttttagtgtattgtggttgtgattatagtttattagttatgggaatttggggagttttattttttcgatgaattagttttttaaattatttaagtaatatttgtttggatataaaatttaaataggtaatagaagagtaaagtttattttttttggtttgtttaatttttttttggttttattgtgagagggattgttaaagtttagatttttaggtttttattgagagatttagaaagatttagaggtttttttgggagtttttttggtgtttttttgttttgttttgttttgtttttttggagatggggttttattatgttgtttgtttaggttggtttttaatttttagatttaagcgatttttttattttagtttttagagtggttggaagtagtgtgtacgtgtttggtttttttaatttaaagtgtatgggttatttttttgggaaatttttaattgggttaggttggtagttttagtttaggttagagattgtaagtgtttttagtgttattggggtttggggtgattttttttgtttattagtttttgtaggattaatttttgtcgtttgggggttttaaattttttttttgtagaatgagtgttgtggagggcggtttttgggtttggtttttgtagttatgtcgtttttttttgtttttttttcgtttttttagaagttttttagaaatttttatagtagaggttacggtatttgtttgttgggtgttgatgttaagattttttttttatttatttttttttcgaattagcgtttttttaggttttttttttgtttgtttaggtttttttcgttttgttttcgatggggtttaatttttttataagggtgtgtttgtgattttttttataaggtatgttggattttcgtttagaggtattttaggtttgtttattttttttttttatagggaacgttatttttattttttttgtttatattcgaagttttttagtttagttgttggttttgatttttagaagtttgtttttttttttcgagggtttttagtgtttggagtgtcgttatttggtcgtgtgatttttttacgggtttgttttttaatttgtagtagagggtttacggtattttttatagggttttcgtgatgggggaaggagcggggaattattttggtttgtgtaattttcggagtttcgttcgggtgagttaacgttttttattttttatggttattaaaagttttgtcgggagcggtgggtaggggcgttttcgcgcgtgggagaaggcgttggcgcggcggttgcggcggcgatggttcgcggagataggggggtggttttatgtaacgggagatgggttcgataagcgggatttgcgcggtcgggttttttttcgcggttttcggcggtggtcggttcgggaggtaggggtgggcgcgtagatcggttagtttggaagttgcggaggttggcgagggggcggtaaaggtggcggttcgagcgttaggtagggtaagggtcggttggatattcgggttagcggtttttcgagcgtcggtgcgtatcggcgaggggcgggagcggtcgaggggtcgaggcgcgtacgtgtcgttttagtatcggttatgttaggtcgagggatttcgcgggttcggtcgagcggtagtttttgttttggagggtggtttttagggattaaggcgtggcgggcggtgcggagaggcgcggtatagatggttatattagagggtttgttgtttgtttttagattgttagcggggatttattttcgtgcgggtaattttaattaatattaattattaaagggtcgtttcgggtatttggcgtatgtggttcgtatttgtttgtaatgcgttgcgtgggtcgttcgtttatggttatggggagttttttcgttttgttttggtttcgaagcgttgggattgggatttttttttttttcgattagtttattttgggaaagttggggttgttttttcgggtttttttggattttgggttttcgttggtaaagatatgatgtttagttaggaggagtaaggtttgagagagttgtttttgtaagtgaaaggatttaattttttagatttttatttttaggaaagttacgaatgtagataattttaaaaattaagaaggttgattatgtaaaacggtagcgttgggaattcgtgttttatgggtttttggtattgttgttttttttgtgagtgaggtatttattgttttgttgtgttttttattgttttttaaaggttgtttataggtcgggcgcggtggtttacgtttgtaattttagtattttgggaggtcgagatgggcggattacgaggttaggagattgagattattttggttaatacggtgaaatttcgtttttattaaaaatataaaaaaattagtcgggcgtggtggtgggcgtttgtagttttagttatttaggaggttgaggtaggagaatggcgtgaattcgggaggcggagtttgtagtgagtcgaaatcgcgttattgtatttaagtttgggcgatagtgtgagatttcgttttaaaaaaaaaaaaaaaaaaaaaaaaaggttgttaagaaaattataaggaaggaggaaaaaatatattttttatttattaagtggaggtggaatattataaaggtttttagcgttattgtttttacgttgagtaggtcgaggaggaagaagaggaggggtcggttttgttattttaggggtggtagaggtaggagagaattcgtggataagtggatttgtgtagtttagaatttgttgtttaagggttaattgtgtatgtaaaaaatttagtggaatttttatttttttttataagtaattattttttttaggtgttgtttttttttttttttggtattttattagtttatgtaaatataagtaattgtgaatatatggttttatttttttttgtttttatatgtgaagtggtattatatatattttttgtattttgttttttttatttattataaaaataatatatttttgtatttatatttagattgggatattttatgattttttttttttgtttttttttattggaattgttattttttttgattatatattttttggatttgttttttaattttttttttattttattttttatttaaaaaattttttttttttgggatatttttatagttttatttttttgagggtatttgattttttgtgtgtgtgtgcgtatgtgtatatgtacgttaatagtattatgtttttgttttattgatattttttaagtttttttttttatatataatttttattttttgtaagttttttttaaaaaattgttttgaattgggcgcggtggtttatttttgtaattttagtattttggggggtcgatcgtttgagtttaggagtttgatattagtttgggaaatatagggagattttatttttataaaatataaaaaaaatttagttaggtatggttgtgtatatttgtgattttagttatttgggaggttgtgtgggagtattatttgagtttaggagtcgaagttgtagtgagttgtgattatattattttattttagtttgggtgatagagttagattttgttttaaaaaaaattttttttttattttataggttttttttgtacgttaggtaattttggattgtttgtatatgttaaaatagggatttttgagggtaattgtgtgggagggggttgttttttatagggtaggtggttgattgtttttatttggggaattttttgtggtagtttttttgtcgtttttttggtaggtaggttagttcgcgtagaaaagattttttttgtttttagtattttagtagtaagggtggagagagggttggggtgggggttttagtatttgttgattgtttttgattttagtatatttcgatcgttttttattgtgtttagtgttttttggtttagatattttattcggagaaaattttgttgtaggagagttattcgattttgatgaataaaaatggatatttaattgttttttaaattgagttttaataattttttttatttttattttttttttttttgatgtttttggtttttttttagtttttgagtatttttgggattttgtaaattaatataggttttagttggtttaggatttagtttttttgggttagttaagtagtttgtttatcgtttttttattttttattttttaaacgttggtgttgttatttattttttttattttggtgggtttaaaattttagaaaatttagttattgttattttagttggttataaagtgggagtttgtgtttattttattgtttttatttggaatttatatttttaatgtagagaatttataaataagataagaaataagaggtaaatattagttttgtattttttttttttggtattataatatttttgtatttttgttatgtatatttatattttgttagaaaaatgagataatatattatatagtttttattttttttttatttaaaatatatgaagagtattttttaatgttagtattttgtatttaaaaaaagattatataaaatgttattgtgtaaagtatagatatgtaaaa

SEQ ID NO: 51 - DNA, 4501 bp, Artificial Sequence
  chemically treated genomic DNA (Homo sapiens)
aagttgttttaggtgtagaaattataaagtaagtaggagtaggtttttgtttttaagatgttttatatgtagtatagatttaacgtatttaaaacggaaggttgttattttttttgtttttttaatttatataataatatatattcgtgttttatgttttaattatattgaattgtttgttttttttattttcgtttgttaatagtgagtagtttggtgtttttagattataggggtgggagggaaagagagagatagtagataattaggttggggtagatagatattagattttgatgttaggtggaggaatttagatgtattggttgttgttttaagttatttttttttggtttaaattttagattggtcgtatagtttaatttttttttttttattaaaggttatttgtgtagaagatgatataaagggggatttagtacggtgattcgtgtttgtaatttttgtattttcggaggttaaggagggaggattatttgagtttaggagttcgaggttgtagcgagttatgatcgagttattgtattttagttttgacgttgagtgagattttgttttttaataaaatatatttaaaatttaaaaagaagattatataaaggggttatttattattttggttagtaatgtagggtaaaatttgaaataatttggttttgtagtattttttagatgttaaatttttattttttattgtatagtttttatagtgttttgtgtgagatgagagggagtatggcgggttttagttggttttgttttgggaaaaattttttatttttgtatcgtttttttaaagcgggggttaagttagcgtcgtttgtttttttatttagattagattttttttttagatgtttttatttttttgaagttttataataattttgtgaggtaagtattattatttttttattttatagatgaaattgaagtttaggaaggttacgtttcgggttttaaatttcggaattttcgtttcgatgttatttaggtttgggttattgagtttaagaaacgggtcgacgggtgattagacggacgtcgggattagtttaagtttagggttgagggtcgttaggtggcgcgtttttttttttttatttttcgcggcggttcgggcgtatttgaatttagcggggtgcgtcggggaaagtaggcgcgtagggtggggcggggagtagttttaattttttagttcggagtgggtaaggagtacggtttagtttagtcggttggtatcgttaagcggtcgtcgggtcgtattagttttttttttgtttgcgttttttagcgtgtaatttatttggggggttatcggggattgaacggagcgggcgagcgttgttaggaggtggggtcggttttatttgtcgattgttcgtagtaggtagggagagggcggggtttgttttatagggttcgttttttagtttttgggtttcgggcgcgcgacgagatataaggtagttaggaaataatgcgtttgtagttcgcgttttcgcgtcgatttcgagagcgttcgggtcgtcgtgcgcgagcgagggagggcgcgcgcgcggggggggcgcgtttgtgagtgcgggtcgcgttttcggcggcgcgtatgtgcgtgtgtgttggttgtcgggttgtttcgagtcggcggggagtcggttcgttttaggtggcgggcggttggagcgaggtgaggttgcgggtggttagggtacgggcgcgggtttcgcggtgcgggttggttgtaggttgttttttgggtacggcgcgttttcgttcggtttcgtcgggttttgggagttgcgtttcgggcggcgttggtaaagtttgttttgaattcgttgtttatagtcgggttcgcgcgttgcgattggttttttttattattttgattcggggttcggtttttcgggacgcgaggattgggcgtaggttgtaagttggtggggttggggaggaacgagagttcggtagtcgattgtgtcgagggattcggggatatttttttcgttcggtcggtattcggttagtacgtttttttttttttttcgtagggagcggatatggattacgattcgtattagtattatttttacgattatgattgcggggaggatttttatcgttttacggcgtttagcgaggatatttggaagaaattcgagttggtgttatcgttttttacgtcgtcgttttggggtttgggtttcggcgtaggggattcggttttcgggattggtttttcggagtcgtggttcggagggtgtatcggagacgaagcggaatttcggggttattcgaaaggttggggtaggaattacgtttttattatacgtcgtgattgtatgtggagcggtttttcggttcgggaacggttggagagagttgtgagcgatcggttcgtttttggcgcgtttcgggggaattcgtttaaggcgttcgtcgtttcggattgtatttttagtttcgaagtcggtaattcggcgttcgtcgttttttgttcgttgggcgaatttaagatttaggtttgtttcgggttcgagagtttaagcgattcgggtaaggattttttcgagttatttaagagggggttattttatgggtggttaaagttttgtttttgtttgaggttaggtattggttttttttaagtttttgggttattttcgtttttttttggttgaagttgttcgtgtagtttttaatcgtgtttgtttggtacgtgggtgtgttggtaaatagtttggaaaagtggcgtgggagttagtttttttttgatgattattggagttttaggggataagggatttgaggtgagggttggcgtttagagaggataatattggggttggattgtaagggattgaagggggtattttaagagatattttaaatttgaagtttttttgttgttgtttttttttttaggaaatttatatttttttagggggagaagaagtcgagagttttttgtgtaaagttaaaattttcgtttttttaaaaatttaggtttttagttggttttattttaaaatgttaataataaatgtttttttttcgtgtttttttattattatttattattcgtgtatttttgagatagggagggaagaatgaatattttttattaatagatggaaaaattgaggtttagagatagataattattataagttagttttagttttttgttatttagttagttttttttttttaatgttttattttaattaggtattttttttttgatgtttggggtttttgtggtagtttattttagaagtattatattttgttttgttgtttgttttgagatggaaaagtgttttttttgtttttttttaatagatttttagcgttagttgttttttggtatttaataaatatttattggtttttattttgtggtaatttgtgggttatatgttggggttaaggtagtagaattttaggttttttttttttatttttgatgtaagtgtaatttcgttgagggtagattggggtattttgtgttattaaattatattgtttttattttggtattttagatttttatattcgtgagaaattttggagagggtatttttgtagagtgtagattgtggttagtgataaataaattaggattaagaaagtttattgtagtttttaggaataatttttatacgattatttgatagggaattggggaatggggtatggaagtttttttatatttgagagaaaaaataggataataaaaattaaaagtttttttttttttggtttattgtgttaaggttatttttaattagtttgttttttatattaagagtttatgtttgtttaatggttggaaagagaattttgagattaaaaaattaataaagatgtatttttataacggttggtggagtggtagagtggaaagagtattgttttggaagttggatattttagtttgagatttagaacgttataaaggtgatatgtggatttcgttgatttgggttttagtttttttatttgtatacgatggggttggatttgattgttttgttgatgatatttttttgtttggatagagtaagatattattttttgaaagggagaatggtgttttaaattattttttttttagatagaatttttttgagttacgaggtttaatattgaaaattaaaggtttgggatgtagggaagtttgttgaattattttttaatttattttttaatttgaatttgtttgtgagtttttagtttatttataggttatatggtttggaataaaatgtaatagattgtaaataatgaggcggggggtggggaaagtgattggtagtagagtttatttaataggggttaggggttgggtaagatagaagtttaaatatagcgtaattagttaattatgggttttggggttaggagggttgaatggttaggtttattaatggagaaataatgcgattgtttatataatggaagtttttttgataaa

SEQ ID NO: 52 - DNA, 4501 bp, Artificial Sequence
  chemically treated genomic DNA (Homo sapiens)
tttgttaggaaggtttttattgtgtggataatcgtattatttttttattaataaatttgattatttagtttttttggttttaaagtttatgattggttgattacgttgtgtttggatttttgttttatttagtttttagtttttattgggtgagttttgttgttaattattttttttatttttcgttttattgtttgtaatttgttgtattttgttttaggttatgtggtttgtgagtgaattagaagtttataaataggtttaggttaaagggtaggttagaaaatgatttagtaggtttttttatattttaaatttttaatttttagtgttaagtttcgtggtttaggaagattttatttaagaaagaaataatttaagatattatttttttttttagagagtagtgttttattttatttagataaggaaatgttattagtaggataattaagtttaattttatcgtgtgtaaatggggaaattgaggtttagattagcgaagtttatatattatttttgtaacgttttggattttaaattaaaatgtttaatttttaaagtaatgttttttttattttattattttattagtcgttgtagagatatatttttattggttttttgattttaagattttttttttagttattaaataaatataaatttttggtgtagaaagtaagttggttaaaaatgattttaatatagtggattaggaaaaaaaagatttttaatttttgttattttatttttttttttaagtgtaggaaaatttttatattttattttttagttttttattaaatggtcgtgtaaaagttatttttaaaagttatagtgagtttttttggttttaatttatttgttattagttatagtttatattttataaaaatattttttttaggattttttacgggtgtggaggtttaagatgttagaataagaataatgtagtttagtggtataggatgttttagtttgtttttagcgaggttgtatttgtattaaggatgggagaggagggtttggagttttattgttttgattttagtatgtagtttatagattgttataaagtaggggttagtgaatatttgttgaatgttagggagtagttgacgttggagatttattgagggggagtaagaaggatatttttttattttaggataaatagtaaggtaaggtgtagtgtttttaagataagttattataaagattttaaatattaaggaagaggtgtttggttgggatggagtattggggaagaggggttggttagatggtagaaagttggagttgatttgtagtgattgtttatttttaagttttagtttttttatttgttaatggggagtgtttatttttttttttttgttttagggatgtacgagtggtaagtggtggtggggaggtacgagaagagggtatttattattggtattttaaagtaaagttaattggagatttaggtttttaaaaggacgaaggttttggttttgtataaaaggttttcggttttttttttttttaggggagtgtgagttttttagggaaagaggtagtagtaaaaaaattttaggtttggagtgttttttaaggtattttttttaattttttatagtttaattttagtattgttttttttaagcgttaatttttattttaaattttttgttttttggggttttaataattattaaagggaggttggtttttacgttatttttttaaattgtttattaatatatttacgtgttagatagatacggttggggattatacgggtagttttagttaaagagaggcggagatggtttaagagtttgagaagagttaatgtttgattttaggtaggggtagagttttggttatttatggggtggtttttttttggatggttcggggaggtttttattcgagtcgtttgggttttcggattcggagtaggtttgggttttgggttcgtttagcggatagggggcggcgggcgtcgggttgtcggtttcgaggttgggagtgtagttcggggcggcggacgttttgggcgggttttttcggggcgcgttaggagcgagtcggtcgtttatagttttttttagtcgttttcgggtcgagaagtcgttttatatgtagttacggcgtatgatggaggcgtagtttttgttttagtttttcgagtggtttcgggatttcgtttcgttttcggtgtatttttcgggttacggtttcgggggattaatttcgggggtcgggttttttgcgtcgggatttaagttttagggcggcgacgtggggggcgatggtattagttcgaattttttttagatgttttcgttgggcgtcgtggagcggtagaaatttttttcgtagttatagtcgtagaaatagtgttggtacgagtcgtagtttatgttcgttttttgcgggagggaaggggggacgtgttgatcgggtgtcggtcgggcgaaggaggtgttttcgggtttttcggtatagtcggttgtcgggttttcgtttttttttaattttattagtttgtagtttgcgtttagttttcgcgtttcgggaagtcgggtttcgggttagagtggtaggggaagttaatcgtagcgcgcggattcgattgtgggtagcgagtttaaagtaaattttgttagcgtcgttcggagcgtagtttttagggttcggcggggtcgggcgggggcgcgtcgtgtttagaaggtagtttgtagttagttcgtatcgcgggattcgcgttcgtgttttggttattcgtagttttatttcgttttagtcgttcgttatttggagcggatcggtttttcgtcggttcggggtagttcggtagttagtatatacgtatatgcgcgtcgtcgagagcgcggttcgtatttataagcgcgtttttttcgcgcgcgcgttttttttcgttcgcgtacggcggttcggacgttttcgggatcggcgcgggagcgcgagttgtaggcgtattgttttttgattgttttatatttcgtcgcgcgttcgggatttagggattggggggcgggttttatgggataaatttcgttttttttttgtttattacgggtagtcgataggtggggtcggttttattttttggtagcgttcgttcgtttcgtttaattttcggtagttttttaaataaattgtacgttggggagcgtaaataggaggagggttgatgcggttcggcggtcgtttggcggtgttagtcggttgagttaaatcgtgttttttgtttatttcgagttggggaattagggttatttttcgttttattttgcgcgtttatttttttcggcgtatttcgttgggtttaggtgcgttcgagtcgtcgcgaggggtagggggagggaaacgcgttatttggcggtttttagttttgaatttgggttggtttcggcgttcgtttggttattcgtcggttcgttttttgagtttagtggtttaagtttggatggtatcgaagcgaagatttcgggatttagagttcgaaacgtaatttttttgagttttagttttatttgtaaaatgaagggatggtaatgtttattttatagggttgttgtgaggttttagggaaataagagtatttagggaaggggtttggtttaggtggagaggtagacggcgttggtttagttttcgttttggggaggcggtgtagaaatgaggaattttttttagggtaaagttagttgagattcgttatgtttttttttattttatataaaatattgtaggagttgtatagtagagaatgaggatttggtatttggaaaatattgtaggattaagttgttttaagttttgttttgtattgttggttaagatgatagataatttttttgtataattttttttttaaattttaaatatattttgttaagagatagggttttatttagcgttaaggttggagtgtagtggttcgattatgattcgttgtagtttcgaatttttgggtttaaatgattttttttttttagttttcgaaagtgtagggattataggtacgggttatcgtgttgggtttttttttgtgttattttttatatagatgatttttggtggaagagaaaaaattaaattatacggttagtttgagatttaggttagaggagagtaatttgggatagtagttaatatatttagatttttttatttggtattaaggtttggtgtttgtttattttagtttgattgtttgttgttttttttttttttttttatttttgtggtttaagaatattaaattatttattgttggtagacggaagtgagaagggtaagtaatttagtgtggttggagtatgggatacggatgtgtgttgttatatgggttgggaaggtagggaaaatgatagtttttcgttttagatacgttgggtttgtgttgtatgtgggatattttgaaggtagaaatttgtttttatttgttttgtgatttttgtatttagaatagttt

SEQ ID NO: 53 - DNA, 6894 bp, Artificial Sequence
  chemically treated genomic DNA (Homo sapiens)
gatagtttttattattagaatttagagtttaggagtatagttttatattggttttttttaaagtttggattataggattgttttttagaaaagtttgaaagtttttggtaaatagtatttagttatttagttttttttttttagtttttttttagaagagtaattcgagaaaatatttagtagcgtagaggaaagcggtatagtgttgttaatttatttttagtaagatttacggaattttaaaaatatagtttatgggttttaggacgtttgtagttttgttgtttaaaggttttttgtagtattaattttttttttaaattataagtggtgtttataggttttgttgttttttaaattttagagagatttttttttaaatgaaatttagagaatagaaagatttaaaattattttgatttggttagatatagaggtttaagattgttaagttattttgtgtttatttttttattaaagttattaaaatttttttattaaatgaatatttatggaagcgttaagattaattatttttggagttaaatagattttgatttaaattttagttgtgtaatataaagtttgtgggattttagatcggttttttggtttttgggttttaattttttaggggtgagttagattaggggtgagttagagagaataggatttttttgtattgttaataagaggattaaaatgagatttattatgtatagtataggatataagattagttggtatataataagaatttaatatataatagagttttttttttatttttggagtttttaaaaaatataaaaattatatatattttttttggttaaagatgatgattaatataaaaattttattttaggtttatgttttttggattttttaaagagtatttaatagagtgagttatatttggggttatatttgagttattcggggttatgtttttgtgttttgtgatgttgttaattcgatgatttgtgcgttttttttagttaaaaaataaaagtcggttttgtttttttttgtagttttttgaatagttataattattttaattgtttgttttgtttgttaagatttacgtttttaggtaaacgaattaattaagtttttttttgggtatagattataaagttatgaaaaatttgttttttttttttttttttatttattattttatttttgttttttggggagtattgtagagttagagttttttaagattttgtttattgtaagtttaaggtgatggagtttggttttcgggttaggagttaattttagaggttttaataatataagaaagaatgagatttaaagattattttgttaggtgggatggtttatatttgtaatttttagtgttttgggaagttaaagtgggaggatgttttgagtttaggagtttgagataggttttaatagggtatggatagaggaaagtagtatggaattgaagggtggatatttattgtttagtaaattataaattttggaaggaggtggaagggttttagatttgtgttgtttgtagtgaagaaattaagatataaaaaagtaaatgggagaggatagtagacggttttgaatggatgagagttagatatatggtaggtgtagatttttatttaagttttttaagttaaagatattgttgaaatatttggattattgacgttattttatagtaggtttttgtgaagtttaaatggagtgagttttgttttttttaattgttatttagtgtgttttataggtaatttttaagtaggaataataggagtatagtaatgtagtagaatttataaattttatttggtattgagaaaggttaagtcgagaggaaagtgattgttgttaattttattgtagtttgtgttggagtagggggtgttgtgtttggttttttgtatttgttgttattatttttgttatttgtgaaaggagtgtgatatggtggttataaggcgggttttgttgtattttttttagattgtggttttgggcgtttgtttaatttttttggggtagttttttttgggggttgagtgagtgaatgtatttggagaattaggtggtgtttatggtatgttgagtatttataaaggttattaattcgtgttattggttttttaattaagaatggggttatatattatttgtagtttttattattagtttggtagtatttataaacgtgtagtagtaatgtttgattggtggttttttgaagggattttatgggtatattgtgtatttgtttaaatttagggttttttatggatttataggattggtagttgtaggttagtaatgtatagtaattgaagttgggtttttaaattatttgtttttaaaaaaatattataattatttttaatatgtttttttttttttatgaattttattattaaatgtatttgaaattggaaatatatattaattttgattatatttaatggatttatgagatgggagtatttgttttagtagagtttttatatatggtttatgttggttataggtgttggtttttgtattaattaggattttgaagaggaaaataaatagtaggagatgggtagagatataaaagatttattataaggaattggtatatatagttatggggttgcgtagttttaagttttatatttagtaagttggagatttaggagagtagatgatgtgttttggtttgaaagttagtagacgtgagatttaagaggagtttatatttttgtgttagttcgaaggtaggaagagattagtgtttttattaggtagttaggtaggaggagttttttaggtcgtcgaggagttggtttgttatttttaggttttttgttgattggataaggtttttttttattttagagggtttttgttttatttagtaatttgtttaaatgtgtattttatttagaaatatttttagatatatttagaatattgttttattatatatttggtattttgaaatttagttaggttgaaatatgaatattaattattataggtttttttttattatcgatgtttttttagtaggtggggtatagtatataggattttttttatttttgaggtttttttagtaggtgggatatagtatataggttttttttgttattttcgaggtttttttagtaggtgggatatagtatataggttttttttgttatttttgaggtttttttagtaggtgggatatagtatataggtttttttttatttttgaggtttttttagtaggtgggatatagtatataggtttttttttttattttcgaggtttttttagtaggtgggatatagtatataggtttttttttttattttcgaggtttttttagtaggtgggatatagtatataggttttttcgggtttgggtaggaggtacgaaggtgatttatttttgtttgtttaggattgaggtggtttttgagatgtagaatttttggtttttaaattttgtttatgttttaggtaaataaggtaaattggttattttaggtagaatttttatagtagttacgttttgttaatttttttttttcgtatttatcggatttataaatttttttttgaatatttgatttttgatttaattttttttaaggtaattagtttttttttagataagtttttagagtgaggtcgtgatgggtttttcgtggattttagattataggttgtgtttttaaatttgttttttttaggaagtgtttttttcgttacgtggtgttggttttttttattggtgtattgtcgtagttcgtttttattttagagatatagaaaataagaagtttttagaaatgttagttttaggagttttatttttgaaatagaagtgttgacgtttattgtatagttatttttgggaatgatatattagtatttttatcgttattttataggttgtggggttaggtagtgatttagggagacgagtagtgagaaggaatggattaaatatttttcgagtttatcgagtttagttatcgttttttagttagagaaggtagttgtgggtttttttgtttttatatggatttttttttgttttatttttttttttattaagggtatcgttgttgtttatttgtttattttatatttacgtgtgtttacgagaaggatgggagggaaagtggggcggtaaagaataatttttgttattatttttcggtttaaaattttattaaagtttttttttataaagtgtttaagatgagggtttagtatattattttatttaaattataatattttatatatatttttataaatgtaaggggtataaaagtgttattttgttatatggatatatcgtgtagtggtgaagtttgggtttttagtgtatttgttattagaataatatacgtgttatttatagggtaattttttattattcgtttttttttattttttcgagtttttaatgtttattttatattttatatttacgtgtatgtattatttagtttttatatataagtgagaatatgtagtatttgattttttttttttgagttattttattttgataatggtttttatttttatttatgttgttgtaaaagatatgattttattttttttgatagttggggagtattttattgtgtatatgtattatattttttttatttatttatttattgatgaatattttagttgattttatatttttgttattgttattagtgttgtaataaatatatatgtgtaggttttttttaatatattgatttttttatattttatggagggaatagagtttttttaagcgagtgtggttggtttttattttttagtgtattttgtaattaatatttttgtatatttttttttaggtgattgggagattttaatttagatttttagtaagtgttataaggaagaaaagattttgaagaattaattaagtttttcgtgaagttaagtttaagtaatattttcgttttaattataagtaggagaaatgaagtatattattaattcgtatgaaaatattaataatatagtaagaaataatttcgattgttttcgtgtggttttgtcggaggagatattttttataatttttattgttggagttttggagaatttgatcgttttgttggttgtgtttaagaataagaatttttaggtatttatgtatttttttatttgtagtttggttatatttgatatgttgggtagtttatataagattttggaaaatattttgattatattgagaaatatgggttattttaagttacgtggtagttttgaaattatagtcgatgatattatcgattttttgtttgttttttttttgtttggttttatttttagtttgtttgtgattgttgcggatcgttatattattattttttacgtattgcggtattatagtatcgtgattatgcgtcgtattgtggtggtgtttacggttatttggacgttttgtacggggattggtattattatggtgatttttttttattatgtgtttatagtgattatttttacgtcgttgttttcgttgatgttggtttttattttgtgtttttatgtgtatatgtttttgttggttcgattttatattaggaagatttttattttttttagagttaatatgaaaggggttattatattgattattttgttcggggtttttattttttgttgggttttttttgtgttttatgtttttttgatgatattttgtttaagtaatttttattgcgtttgttatatgttttttttttaggtgaacggtatgttgattatgtgtaatgtcgttattgatttttttatatatgtttttcggagtttagagtttagggacgtatttaaaaagatgattttttgtagtaggtattggtagaatggttgatttttggttttagaatttatgggaataacgttgttaagtgttagaatagtgtaatattttaataaatgttagtgttttttattggttttttttttttaatggatgtaaggatgattttattagttagtgtttttaatagttaggttttatgtgaatagttttattgtaggggtaattttttaattttgtgattggatagataaaacgatgtagtaaaagaaggatagaatataaagtattaggtaggtataaaagtaattaaggtttttgttattatttttaatgattaaaaattgtaattatttttgtattaatttagtaaaatagtaataaaaatttaagggttttgggttaaggtaaagatttgtttttttgtggatatttaataagttagttttgaggtggtttttttaggtggaggttattgtagttaatttttagaagttaagtatttggatatgcgattttaggtagaagatgtagggtttttgtaagttaataataaattggaaggaatgtattgttgtagttgaatttgtttgttttttatagttatgtggaatttttatttttttttttttttttgttagtttgatgtattgatgttattttagttttagaaagtaggttgagtataaattataaatgttaaataacgagtttcgagtttttaatgataaatggattttttttgttagttttttttgtttatttagtattttattggttttaaaatttttttttgttatatttttttatgttttatgagtatatattttaaaggaagaaatgaaaatttaatttatttagtttttatgtgggaatatataaaggttagatgaaaattgttattatttgaagaagttgtaattaaattatgtgtgttataatgtagaagtataagaaaagagttttaatatgtattttaagaaataaagagagagagatagagatagatagagagagagagagagagagagagagagagtgt

SEQ ID NO: 54 - DNA, 6894 bp, Artificial Sequence
  chemically treated genomic DNA (Homo sapiens)
atattttttttttttttttttttttttttttttgtttgtttttgtttttttttttttattttttaaaatatatgttggggttttttttttgtatttttatattgtaatatatatagtttggttatagtttttttaaatagtgataatttttatttggtttttatgtatttttatatgggaattaaatggattaaatttttatttttttttttgaaatgtatgtttataaagtatgaggaaatgtaataggaaagggttttaaggttagtgggatattgagtgagtaaagaagattaatagagaaggtttatttattattggaaattcgaagttcgttatttgatatttatagtttatatttagtttattttttgaaattgaggtggtattaatatattagattaatagggagaaagaggagggtggagattttatatggttgtgggagatagataaatttagttgtagtaatgtattttttttaatttattattggtttatagagattttatattttttgtttggagtcgtatgtttaggtatttaatttttggaaattggttgtaatggtttttatttggaaaggttattttagaattggtttgttagatgtttataggaaagtaagtttttgttttagtttaaagtttttgaatttttattgttgttttattagattggtgtaaaagtaattgtaatttttggttattgaaagtaatggtaaaaattttaattatttttgtatttatttaatattttgtattttattttttttttattatatcgttttatttgtttagttataaagttaagaggttgtttttataataagattgtttatatagaatttagttattagaaatattagttggtgggattatttttgtatttattagggaaggaaggttagtgaggagtattggtatttgttggaatgttatattattttggtatttggtaacgttatttttatggattttaaaattagggattagttattttattagtatttgttgtagaagattatttttttgaatgcgtttttgagttttgggtttcggaaggtatatatgaaggggttaatgacggtattgtatatgattaatatgtcgtttatttggaagagagatatgtagtaggcgtagtaggggttatttgggtagaatgttattaagaggatatgaagtataaagggggtttagtagaagatgaagatttcgagtaggatggttagtgtgatggttttttttatgttggttttggggagggtggagatttttttggtgtgggatcgagttagtaggaatatgtgtatatagaggtataggatgaagattagtattagcgggaatagcgacgtgaaggtgattattgtgggtatatgatgggagaagattattatggtgatgttagttttcgtgtagaacgtttagatgatcgtaagtattattatagtgcggcgtatggttacgatgttgtggtatcgtagtgcgtggaagatggtgatgtagcggttcgtagtaattatagataggttgaagatggagttaagtagggagaggataaatagggagtcgatgatgttatcggttgtggttttaaaattgttacgtggtttgagatagtttatgttttttaatatgattaggatattttttaagattttatataggttgtttagtatattagatatggttaagttatagatgaaaaagtatatgggtgtttggagatttttatttttgaatatagttagtaggacgattagattttttaaaattttaataatggaaattgtgaaaaatatttttttcggtaaaattatacgaggatagtcggaattattttttgttgtgttgttgatgtttttatacgagttgataatgtgttttattttttttgtttgtggttaaggcggggatgttatttggatttgattttacggaaaatttgattgattttttaggatttttttttttttgtagtatttgttggagatttaagttaaaattttttaattatttaaaagggagtatatagaaatattagttgtaaagtatattagaaaataaaaattagttatattcgtttaaagaaattttattttttttataaaatataaagaaattagtatattagaaggagtttgtatatgtatgtttattgtagtattagtgataatagtaaagatatggaattaattaaagtgtttattaatgggtgaatggataaagaaaatgtggtatatatatataatggagtattttttagttattaaaaagaataaggttatgttttttgtagtaatatggatggaagtggaggttattattaaagtgaaataatttagaaagaggaagttaaatattatatgtttttatttatatgtgggagttaaataatgtatatacgtggatatagagtgtggaatggatattggagattcggaagggtgggagggggcgggtgatgagaaattattttatgggtaatacgtatgttattttgatgatagatatattaaaagtttaggttttattattatacggtatatttatgtaataaaatggtatttttgtattttttatatttataaaaatatatataaagtgttgtaatttaggtaaaataatatattgggtttttattttaagtattttgtgagaaaaagttttagtggaattttgagtcgagagatgatagtaaagattattttttgtcgttttatttttttttttatttttttcgtgaatatacgtgagtgtgggatgaatagatgaatagtagcggtgtttttgatgaaaaaagaggtaaagtaaggaaaggtttatgtgggagtaggagagtttatagttgttttttttgattgggaggcggtggttgggttcggtggattcgggagatgtttagtttatttttttttattgttcgtttttttgggttattgtttgattttatagtttgtgggataacggtaaaggtgttgatgtattatttttaaagatgattatataatgagcgttagtatttttgttttaaaggtggagtttttgggattggtatttttggagattttttattttttgtgtttttggggtgaaggcggattgcggtagtgtattagtggggaaagttagtattacgtggcgaggaagatattttttagggaggataaatttgggagtatagtttatgatttgaagtttacggggagtttattacggttttattttagggatttgtttggaaaggaattaattattttggaaaggattgggttagaggttaagtgtttagaaggaggtttgtgggttcggtggatgcggaaggaaggggttgatagggcgtagttgttgtgagggttttgtttggaatggttaatttattttgtttgtttgaaatatggatagggtttaaaagttagaagttttgtattttaggaattattttagttttgggtagatagggatgagttattttcgtgttttttgtttaggttcggggaagtttgtgtgttgtgttttatttgttggggaagtttcggggatgggaggggaagtttgtgtgttgtgttttatttgttggggaagtttcggggatgggaggggaagtttgtgtgttgtgttttatttgttggggaagttttagggatgggagggggtttgtgtgttgtgttttatttgttgggaaagttttagggatggtaggggaagtttgtgtgttgtgttttatttgttggggaagtttcggggatggtaggggaagtttgtgtgttgtgttttatttgttggggaagttttagggatgggaggggttttgtgtgttgtgttttatttgttggggaagtatcggtgatgggagggggtttgtggtggttggtgtttatgttttagtttgattgagttttagggtgttaggtatgtggtgagatagtgttttaggtgtgtttgagggtgtttttgggtgagatgtatatttgaataggttattgagtaaaatagaggttttttgggatgggggagggttttgtttaattagtagaaagtttgaggataatagattagtttttcgacgatttggggggttttttttgtttgattgtttgatggagatattggtttttttttgttttcggattagtatagaagtgtgagttttttttaggttttacgtttgttggtttttagattagaatatattatttatttttttgggtttttagtttgttgagtgtagagtttgggattgcgtagttttataattgtgtgtgttaattttttatagtaaattttttatgtttttatttattttttgttgtttatttttttttttagaattttggttaatataggggttaatatttgtggttagtatgggttatgtatggagattttgttgggatagatatttttattttatgagtttattaaatgtaattagaattagtatatatttttaattttagatgtatttgatggtaaaatttataaaaaaaaaaagatatgttgaaagtggttgtaatatttttttagaaataggtggtttgggagtttagttttagttgttgtgtattgttgatttgtagttgttaattttataaatttatggggagttttgaatttggatagatatatagtgtgtttatggggtttttttaaaaggttattaattaagtattgttattgtacgtttgtggatgttgttaagttggtggtgggggttgtaggtggtgtgtggttttatttttggttgaagggttagtgatacgaattggtggtttttatgagtgtttagtatgttatgggtattatttaattttttagatgtatttatttatttaatttttagaggaagttattttagaaaggttgggtaaacgtttaaagttatagtttggagaggatatagtagagttcgttttgtgattattatgttatattttttttataagtggtaagggtaataataatagatgtaagagattagatatagtattttttattttaatataaattgtaataaaattgatagtagttatttttttttcgatttggttttttttagtgttaagtaggatttgtaaattttgttgtattgttatgtttttgttgtttttgtttagagattgtttgtagaatatattaaatgataattagaagaagtaaaatttattttatttaaattttataaggatttgttgtgaggtggcgttaatgatttaaatattttaataatgtttttggtttaaagaatttggataggggtttgtatttgttatatgtttggtttttatttatttaaagtcgtttgttgtttttttttatttgtttttttgtgttttgatttttttattgtaaataatataggtttagagtttttttatttttttttagggtttgtggtttgttgggtaataaatgtttattttttaattttatgttgtttttttttgtttatattttattgaaatttgttttaagtttttgggtttaaggtatttttttattttagttttttaaggtattggggattatagatatgaattattttatttggtagagtgatttttaaattttatttttttttatgttattggaatttttggagttaatttttggttcgaagattaagttttattattttgagtttgtagtaaataaggttttagaaggttttaattttgtagtgttttttaggaggtagagatggggtggtggatgagaaaggagaaaagagataagttttttatagttttataatttgtatttagaaagaaatttggttgattcgtttgtttgaaggcgtaggttttggtaggtagagtagataattggggtagttataattgtttaagggattgtaaggaaaagtaaaatcgatttttgttttttggttgggaggggcgtataaattatcgagttaatagtattatagggtataagaatatggtttcggataatttaaatgtggttttaaatgtggtttattttgttagatgttttttggaaagtttagggagtatgggtttaaagtgagatttttatattgattattatttttgattaaaaaaaatatatatagtttttatattttttaaaggttttaagggtaaggagaaggttttattatgtgttaaatttttgttatgtgttagttggttttgtgttttgtgttgtgtatggtgggttttattttaatttttttgttgataatataagggagttttattttttttgatttatttttgatttgatttatttttgaggagttgaggtttagagattaagagatcggtttaaagttttataggttttgtgttgtatagttgggatttaaattaagatttgtttggttttaaaaatgattaattttagcgtttttatgaatatttatttgataaggaagttttaatggttttagtaaaaaaatgaatataaaataatttaataattttaaatttttgtatttgattaaattaggatggttttaaatttttttgttttttaaattttatttagagaaaaatttttttgaaatttagagaatagtaagatttgtagatattatttgtggtttaggaagggagttaatgttatagaaagtttttgagtagtagggttgtaggcgttttggggtttatgggttgtgtttttggggtttcgtggattttgttgaagataagttagtaatattgtgtcgtttttttttgcgttgttgggtgttttttcggattgtttttttggagaagagttggggaaggaggattgagtggttgagtattgtttattaggggtttttaggtttttttagagggtagttttgtaatttaggttttagagagagttagtgtaggattgtgtttttgagttttgggttttggtggtgggagttgtt

SEQ ID NO: 55 - DNA, 1157 bp, Artificial Sequence
  chemically treated genomic DNA (Homo sapiens)
ggattttgttttttttgaaggttttagggaagagtgttttttgtttttttcgaaggttttagggaagggtttgtttttttaggtttttggtggtttgtaggtgtagttttttaatttttttttttaagcggtttgttgtttataaggatacgagttatattggatgaggggtttattaattgatggtttttgtaaagtttttatttttaaataaggttatattgtgaggtattgggagttaggattttaatatagtttttttggtggatataatttaatttttaataacgtttatataattttaagtagggtttggtattttgtgtgttttttggagagcggttgagttaggttttggtagtgtttaggttatcggtgattgtagtttttggacggtatcgtttattataggttttggaggttgtttttacggttttttgatagggtttttgttggtttgggggtttttgattaggggagcggttttaggaggggagagattcgcgtttcgggtttagcgtagtcgtttcgagtaggatcgggatttttattaagcgggcgtcgttttacgattttcgcgcgtttttaggattattcgggtacgtggtaggtcgtttgtacgttcgcggattatttttgtgataggaaaaggtacgggttatttggtaaattaaggtatagagttttaggcggaagttgggaaggcgtcgttcggtttgtatcggtcgaagggttattcgggttaggcgtatagggtagcggcgttgtcggaggattagggtcggcgtgtcggcgtttagcgaggatgcgtagattgttttaggttcggcgtcgtcgtattgggtatgcgtcgattcggtcgggcgggaatatttcgtttcgttcgggtttcgttttagtttcgttttcgcgcgtttcggtttcgttttcgcgcgtttttttgttttttttaggttttcggtttcgtttcgttttagatttcgttttacgtcgttattttcgtgtttttcggtttcgttttcgcgtttcggatatgttgggatagttcgcgtttttagaacgttttgcgtttcgacgttcgtaggttttcgcggtgcgtatcgtttgcgatttggtgagtgtttgggtcgtttcgttttcggaagagtgcggagttt

SEQ ID NO: 56 - DNA, 1157 bp, Artificial Sequence
  chemically treated genomic DNA (Homo sapiens)
gagtttcgtattttttcgggagcgaggcgatttagatatttattaagtcgtaaacggtgcgtatcgcgaggatttgcgggcgtcgggacgtaaagcgttttaggggcgcgggttgttttagtatattcggggcgcgggggcggggtcgaggggtacggggatggcggcgtggggcggggtttagagcggggcggagtcgaggatttgagaaaagtaagagagcgcgcgggggcggggtcggggcgcgcgggggcggagttggggcggagttcgggcggggcggggtgttttcgttcgatcgggtcggcgtatgtttagtgcggcggcgtcgggtttgaggtagtttgcgtattttcgttggacgtcggtacgtcggttttggtttttcggtagcgtcgttgttttgtgcgtttgattcggatggtttttcggtcggtataagtcgggcggcgtttttttagttttcgtttgaggttttgtgttttagtttgttaaatggttcgtatttttttttgttatagggatagttcgcgggcgtgtaagcgatttgttacgtgttcgagtggttttgaaagcgcgcgggggtcgtaggacggcgttcgtttagtgagaatttcggttttgttcggggcggttacgttgagttcggagcgcgagtttttttttttttggggtcgtttttttagttagggatttttagattagtagagattttgttagggggtcgtgggggtagtttttagggtttgtggtgggcgatgtcgtttaggggttgtagttatcgatggtttagatattgttagagtttgatttagtcgttttttagagagtatatagggtgttaggttttgtttggggttgtgtggacgttattaggagttgaattgtgtttattagagaagttatgttggagttttaatttttagtattttataatgtgattttatttggagatggggattttatagaagttattaattagtgggttttttatttagtatgattcgtgtttttataggtagtaggtcgtttggggaggaggattggagggttgtatttgtaagttattagaagtttaagaggatagatttttttttggagttttcggagggagtagaggatatttttttttggagtttttagagggagtaggattt

SEQ ID NO: 57 - DNA, 8093 bp, Artificial Sequence
  chemically treated genomic DNA (Homo sapiens)
ttatggaaggaaatgagattagttagcgagttgatatagaataaggtagtttaaaataaatttttttaaaaatacgaagaatagatattgaagggaagaggtgtttgtaaagattaagaaagtatatttggagatggtatttttttaaagttaaagttattaagtgtttaagtgttttaaggagggtaagattattaataaggatttagtatagtagagtaatttgagtggtaatacgggatattgggaatataaatttgttaagaaaattagtaggaatgagttataggatagtaattggtaaggatttaataattttttttttaatgtacgtattttaattatatttattgttataataggattagtaataattatatttatttaaaaaaaaaaagattgttatgtagttatagaattatttaatatagaaaatagtaaaatatatttttttttttttttttttttttttttttttttataaataagattagtttatagtaaattttttatagttaagggttaatttaaaatttttggtttatattttttttttatttaatgattatatgatgtaaattaattttattaatattttaagtaaaatatattggaattttataaaatgtataagattttaatatttaaggaattggggttagaaagtagaagtggtttttaggttttttagttttttttttaagtaataaagttttgttgtgaatatttaaagttattgggaaattatcggtagatttttttgtttttttttttcggttttttattatgttgtttttttagatatgtaagtttattttattaattaaaattttagtttgattatttttgataagtatttaatcgatatgtaattttttttttgttttaaatatgtataataggatagagtttttaaatttgatttaattattaatttttgatttataagtgttatggtgagttaatagaatttattaatgtttttattgtattttattagttaaatttagaaggttggaattagttttttttatttagtattttgttagtttgtttagtttgtatttttaattttgtttttaatggtaatttgttttattttttgaaataaaataatttatattttgggagggttaattttttattgtgttaggttgttttatgtattgtaggggtgagtgtttttaggtttaaatgttaatagaagtttttagtaaatatgataattaaaaaagtgtttttatatattttttagtattttttggaatgataggttattgtttttagttgaaagttattggtataattttggtttttaagtttttatgttatttattttaattgtttagatattaattttatttaaatttttagttatagtttggttttttgaatttgttggattagtaattatagattaaggtgttttaatagttaagataggattttggaataagagtttttaaattgtataatatttgagaggatttatgaatataaattgggttttgtttataattagttttatataatgaattttaagattgtttttttatggtgaatagaagtttggaaattattgttttggtataaagtagattattttagtagaaatatagaattattgtaatttgtgaataagattgtttttaaatatttttatttgtgtgttattttatatatagaatgtgtacgatagttttaaattttagaataaatttatttttagtatttaataaaatttgatattgtattattttaaaataaagtgtttattttaggtaggattttttaaaataaagtagtaatatttacgtagataagataaaaaagttaaaatattttatattttttaattttggagtgtaattttttttttttatcgtttttgatagggttaaatttgtgtttatagtaaaaaaaaaaaaaaaaagaattattaattggtaattattaagattttatatttattatagttttttaataggtaagttgataaaatagtttttagttattaaaaaaaaaatttaaggaaaatttttaataattagttttatttttaaattgtatgaagttttttatatttgaaatttaaaaatgattttaatgattttttttattagtaatgtgttattattgaggtgggtgatggggagggaagagggaagaaatttgttagtattattttcgaatttagaaatgtttaaaaaaaagttttaaatattttgatggttagataaaatatttttattgttatgtatgggttttttttttggaaatttatgaatttgttatgtgagtttttgtaaattggtttaaaagtatatttaaggagttgataatttaagattatatgaattagaattttaatattttattaaaataagagttgaaatttttggtatttatttttagaatatttaaaaaatagattgtaaatttaatttatattaatattaaatttttttaaaattaattatattataaaagataatgattttgttattaaattaagttttaaaaaaggtggtatttttatgttttagttttatgttgttatttgagatgaaaaaaaaggtaattgttagaattttaattgtgattagtttggacggttggtatttggtatttttttataatttaaattagtaaatttgaaaatttaaattaatttttgtttttagaattaaatttttgttgagttttttaattttgtattataaagttttatggattagatttattttttttttttataaggttattttaatcgggttttattttagttgtggtaattcgaaatagggtttggagatgtttatttgttaatggttgatttaaagtgtgttggtttcgagttaaatatgaaaaagtttttttatagatttggttattattaaataaggatgttattttataggtaatttttttgataattgggtaggatttagtagataatttagtataaaattgttttaagtttttgattttgtatttattttaaagattagtgtttgtttgaagttttgttagttttatttttattgaaataggtgtatatttaggtttaaagttaaatggatttgaaaaaagttttaagttttttttaatgaatttgaggtttttaaaatgttttttaaattttttttggagacgatagattattatttgatatttattaggattaaatatttttttattttttttattttgttgttttagtttattaataatttttttgagggtaggaaagtttgttagatttttttttttaatatgtttttgaaataaatttagtttaatttcgaaagtataaatatggttaaaggtagtagtagtaaagattttattaattcgtaattttttattgagttttcgaaggtgttttataatgtttattaagaagttaaagttataaagttattgtttgtttgagaagtggattgttgttgtttttattgaaattaagaacgtttttatttttttttttagagagaatattagttttaaagtttttttttttttaagttaattgtttagatatcgtttattaatttttttattatgttttgatttagatttcgttagtaaagtttgaaatttaggtcgtttaacgtttttggttttaattaaaattatttattcggatatggtatttatgatttgattaatatttatattataggagtttaatagttttaagtgaagaaattttgaataatgaatgatattttaatagttggggtttacggtttttttttttatgtatgagacgagttttgagtttttattaattatttttaaagtatgggtcgtggttagtttaattattttttgtaagttaagttttgttgtttgtagggattttaggattgtcgatatgagcgtattaatattgaaatgatgagttaggttgattatggttagaagatttttttgtatttttaatttagggtttatatcgcggataaagattaggaggtagtttttataggttataaaagtttggtcgtttaaggtaagagaataggttttaaagtttttggttcggttaaaaagttggttgcgtagatttttgttaatgtttaggattttttgttttgtgatatttggagataagttaacgttttgtaggacgtttatatgttcgggtagtattttttttagtaatatttttatgtattggtatataaagttttttttattttagtcgcgattttttaaggttaagaggcggtagagttcgaggtttgtacgagtagttttttttttaggagtgaaggaggttacgggtaagtcgttttgacgtagacgttttattagggtcgcgcgttcgtcgttcgttatatatcgttcgtagtattcgtgtttagtttcgtagtggcgtttgacgtcgcgttcgcgggtagttacgatgaggcggcgatagattaggtatagggttttatcgtttttcggaggttttattattaaataacgttgggtttattcgggtcggaaaattagagtttcgtcgatttttattttgttttttttgggcgttatttatattttgcgggaggttataagagtagggttaacgttagaaaggtcgtaaggggagaggaggagtttgagaagcgttaagtatttttttcgttttgcgttagattattttagtagaggtatataagttcggtttcggtatttttgtttttattggttggatatttcgtatttttcgagtttttaaaaacgaattaataggaagagcggatagcgatttttaacgcgtaagcgtatatttttttaggtagcgggtagtagtcgttttagggagggacgaagagatttagtaatttatagagttgagaaatttgattggtatttaagttgtttaattaatagttgtcgttgaagggtggggttggatggcgtaagttatagttgaaggaagaacgtgagtacgaggtattgaggtgattggttgaaggtattttcgttgagtatttagacgtttttttggtttttttggcgttaaaatgtcgttcgtggtaggggttattcggcggttggacgagatagtggtgaatcgtatcgcggcgggggaagttatttagcggttagttaatgttattaaagagatgattgagaattggtacggagggagtcgagtcgggtttatttaagggttacgatttaacgggtcgcgttatttaatggcgcggatacgtttttttgttcgggtagaggtatgtatagcgtatgtttataacggcggaggtcgtcgggttttttgacgtgttagttaggtttttttttttttcgtagatcgtgtgtttttttatcgttttttttcgagattttttaagggttgtttggagtgtaagtggaggaatatacgtagtgttgttttaatggtatcgttaattaagtaaggaagttatttaatttaaaattatgtatgtagaatatgcgaagttaaaagatgtataaaagtttaagatggggagaaaaatttttttttagagggtattgtgttattgtttttttgttttttatttattttagaaattatttgtttatatttaaaggtataatttattttgagttttttttaaaataaatcgtttgtagttttaggataggttgatgtattttgggtttgatttttgattattttattgttaaattagtgattttttttagtgtttttttgttttttatttcggaggacgtatttcgaagatattagattttatgggttatttttggattttgaagtttataattgtgataaaaaatgtgaagggaagagatttgaaatatgtggaaggaaaagtgagtgtagattataaatttttaaaaagataagtttaaaatatatttaaacgttatgttagattattttgttaaaattagttgttagtgacgttcgtacgttaatagaaaaaagaatgttttagtttggagtggtaggtttttagagggatttattgtgaaagtataaattatttagggtaatgggattgagagaatagtgggtagaaaggattattgaaggaaaggaagagaattggaaggtagatgaaagaaggagtaagaatttggggatgtttttttttttttatttgtaatagtagtaatagaagtaatggtagattggtttttgtttttattgtgttagaatgaattgataggataattgggtttattattgtattgtgttagaatattgtaaaataaaattaaatatattagtttggtggtttgtaattaattatttaagtggagatttttattttttttttattttttttttagacggagttttattttgttatttaggttggagtgtagtggcgcgattttagttgattgtaattttttttttataggtttaagggagatttttttgttttagtttttcgagtagttaggattataggtatgtgttattatatttggttaattttgtatttttagtagagatgggatttttttatgttggttaggttggtgttaaaattttcgattttaggtgaatcgtttgttttagttttttaaagtgttgggattataggcgtgagttatcgcgttttgtagttttttgtatttttaatagagatagggttttattatgttagttaggatggtttcgattttttgattttaggtgatttgttcgttttggttttttaaagtgttgggattataagtatgagttatcgcgttcggtttaagtggagatttttatatggagtttagttatattttttttaatatataagttgagatgattaatataattttaatataggggtttatgagaaatgtttgtaatatttaagtaatttattgtttttttttttttttttttaagatgaagttttattttgttgtttaggcggaagtgtagtggcgtgattttggtttagggtaatttttgttttttggttttaagcgatttttttgttttagtttttcgagtagttgggagtataggcgtgtatgattatattcggttaatttttttatttttagtagagacggggtttttttatgttggtcgggttggttttgaatttttgattttaggtgattcgtttattttagtttttttaagtgttgggattataggtgtgagttttcgtgtttagtttattattttatttttgaataaagaattgtttgtgtggggaatagataatttttttttatgtagtttttgttagaaaatttgttttttttagtagttggtttgtgtttataggttattttttgaaagtataaaaaatttattgattttttttttttgggtttttttttttttttgagatagagttttgtttttgttgtttaggttggagtgtaatggcgcgattttagtttatcgtaatttttattttttgggtttaagtgatttttttgttttagttttttgagtagttgggattataggtatgcgttattatgtttggttaattttgtatttttagtataaatggggtttttttatgttggttaggttggttttaaatttttgattttaggtgatttattcgttttggttttttaaagtgttgggattatgggtgtgagttattgcgtttggttagaaaatttattgattttttaaagatttattaattttttgtattattttttttttttttttttatcgtaaatataaaagggaatagtagagaaaattatttagaattttattttttagtgatattatttagtgatattttattagagttatttaggaatttgaggttgaataaagtttaggtaaaagtaaaattagttgagaagagatatttgttaaaagaaatttatttttaattttatttgttgttttttttagaggaatagaaatagtgttgaatgttttattagaaatgatggttgttttgttcgtttttttttttttttttatataatatgtaaatttatatagtgtatgagtttgtaagataaaggaaaaatacgttaatgaggtattattgtttgtatttggagtttgttattattgtttggtttatattaaaatatgtatattagagtagttgtagattgataaattattttttgtttgatttgttagt

SEQ ID NO: 58 - DNA, 8093 bp, Artificial Sequence
  chemically treated genomic DNA (Homo sapiens)
attggtaaattaaatagaaaataatttattagtttgtaattattttaatgtatatattttaatatgagttaagtaatgataataaattttaaatataaataatagtgttttattaacgtgttttttttttgttttataggtttatatattgtatgagtttatatattgtgtgagagagagggaagagacgggtagagtaattattatttttaataggatatttagtattatttttgtttttttaggaaagatagtaagtgaagttaaaaatagattttttttggtagatgtttttttttaattaattttatttttatttgaattttatttagttttaggtttttaagtgattttaataaaatgttattaaataatgttattaaaaaataaaattttgaatgattttttttattatttttttttatatttacgatggaggggaaaaaaaaaagtaatgtagaaagttaataaatttttaggaagttaatgaattttttggttaggcgtaatggtttatatttataattttagtattttgggaggttaaggcgggtggattatttgaggttaggagtttgagattagtttgattaatatggagaaattttatttgtattaaaaatataaaattagttaggtatggtgacgtatgtttgtaattttagttatttaggaggttaaggtaggagaattatttgaatttaggaggtggaggttgcggtgagttgagatcgcgttattgtattttaatttgggtaataagggtaaaattttgttttaaaaaaaaaaaaaaatttaaaaaaaagaagttaataaattttttgtgtttttaaagagtagtttataagtatagattaattgttagagaaaataaattttttagtaggggttgtatgagaaagagttatttattttttatatagataattttttatttagaaataagataataggttgggtacgggggtttatatttgtaattttaatatttggggaggttgaggtgggcggattatttgaggttaggagtttaagattagttcggttaatatggagaaatttcgtttttattaaaaataaaaaaattagtcgggtgtggttatgtacgtttgtatttttagttattcgggaggttgaggtaggaagatcgtttgaaattaggaggtagaggttgttttgagttaagattacgttattgtattttcgtttgggtaatagagtaagattttattttaaaaaaaaaagaaagaagataataagttatttaaatattatagatattttttatgagtttttgtattgaagttgtattagttattttaatttatatattaaaaagagtataattggattttatataaaaatttttatttgagtcgggcgcggtggtttatgtttgtaattttagtattttgggaggttaaagcgggtagattatttgaggttaggaaatcgagattattttggttaatatggtgaaattttgtttttattaaaaatataaaaaattgtagggcgcggtggtttacgtttgtaattttagtattttggaaggttgaggtaggcggtttatttgagatcgagagttttgatattagtttgattaatatggagaaattttatttttattaaaaatataaaattagttaggtgtggtggtatatgtttatagttttagttattcgggaggttgaggtaggagaattttttttgaatttgtgaggaggaggttgtagttagttgagatcgcgttattgtattttagtttgggtgataaagtgagatttcgtttaaaaaaaaaataaaaaaaaaataaaaatttttatttaagtaattaattataagttattaagttagtatgtttagttttgttttatagtattttggtatagtataataataggtttagttgttttgttaatttattttaatatagtagaaataaaagttagtttgttattgtttttgttattattattataagtgaaaaggaaaaaatatttttaggtttttgtttttttttttatttattttttaatttttttttttttttttagtggttttttttatttattgtttttttagttttattgttttgaatagtttatatttttataataaatttttttagaaatttattattttaaattgaagtatttttttttttattaacgtacggacgttattaataattgattttaataaaataatttgatataacgtttaggtgtattttgggtttgtttttttggaagtttatagtttgtatttatttttttttttatatgttttaaattttttttttttatattttttgttatagttataagttttaaaatttaaggatgatttataaaatttggtattttcgaagtgcgtttttcgaaataaaggataggaaaatattaagaggggttattaatttaataatagggtaattagaagttaagtttaaagtgtattagtttgttttaaaattataaacgatttgttttgaaagaaatttaaaatgaattgtgtttttggatgtgaatagatgatttttggaatgaatgaaaagtaagaaaatagtaatatagtattttttgaaaaaaggtttttttttttattttaagtttttatatattttttaatttcgtatgttttgtatatataattttaaattaagtggtttttttatttagttaacggtattattaagataatattacgtatatttttttatttatattttaaataatttttaaaaggtttcgggggagagcggtaaagaaatatacggtttgcggaaaaggagaaggtttgattggtacgttagggaattcggcggttttcgtcgttgtgggtatgcgttgtatatgtttttgttcgggtaaagaggcgtgttcgcgttattgagtgacgcggttcgttaagtcgtagtttttaagtgagttcggttcgatttttttcgtattagtttttaattatttttttgatagtattagttggtcgttggataatttttttcgtcgcgatgcggtttattattgtttcgtttagtcgtcgaataatttttgttacgaacgatattttggcgttagaagagttaaggaaacgtttagatgtttaacggaagtgtttttagttaattattttagtgtttcgtgtttacgttttttttttagttgtagtttacgttatttagttttattttttagcggtagttattgattggatagtttgaatgttagttaaattttttaattttgtgggttgttgggttttttcgtttttttttgaagcggttattgttcgttatttagaaggatatgcgtttgcgcgttagagatcgttgttcgttttttttattggttcgtttttaggagttcggggaatacgaaatatttagttaataggagtagagatgtcggaatcgggtttgtgtgtttttgttgaggtgatttggcgtagagcggaggaggtgtttggcgttttttaggttttttttttttttttgcggtttttttaacgttggttttgtttttgtggtttttcgtagaatgtggatgacgtttaaaagaagtaagatggaagtcgacgaggttttagtttttcggttcgagtggatttagcgttatttggtggtggagttttcggagggcgatggggttttgtgtttggtttgtcgtcgttttatcgtagttattcgcgaacgcgacgttaggcgttattacgaggttgagtacgaatattacgagcggtatgtggcggacggcgagcgcgcggttttggtggagcgtttgcgttagggcgatttgttcgtggttttttttatttttgaagagagagttgttcgtgtaggtttcgggttttgtcgttttttggttttgaagggtcgcggttggggtgagggggattttgtatattagtgtatggaggtgttgttgagagaggtattgttcgagtatgtaagcgttttgtaaggcgttgatttatttttagatattataaggtagaggattttgagtattgataggaatttacgtaattagttttttaatcgagttagggattttaaagtttatttttttgttttggacgattaggtttttgtggtttatgagaattattttttggtttttattcgcggtgtaggttttgagttggaggtgtaagaagattttttgattataattaatttgatttattattttagtgttggtgcgtttatgtcggtaattttagagtttttgtagatagtagggtttagtttgtagagaatggttggattgattacgatttatattttgaggatgattggtgagaatttaggattcgttttatatatgagagaaaaggtcgtaagttttaattgttggaatgttatttattatttaggatttttttatttggaattgttgagtttttatgatgtagatgttaattagattataaatattatattcgaatggatagttttgattaagattagaggcgttaggcgatttgaattttagattttattaacggaatttgaattagagtatggtgaaagggttaatggacgatgtttgaataattggtttaggagagggaaaattttaaaattaatattttttttaagaaaagaaatggaagcgtttttggttttagtaggggtaataatagtttattttttagataaataatggttttgtgattttggttttttggtggatattatggaatattttcgagaatttagtgaagaattacgagttagtaaagtttttgttgttgttgtttttgattatatttgtattttcgaagttaagttgaatttattttaaagatatattgaggaaaaaaatttaatagatttttttgtttttagagaagttgttgatgagttaaaatagtaaaataaggaagatgaaaaaatatttgattttgataggtattaaatggtgatttgtcgtttttaaaaagaatttgagagatattttaaggattttaggtttattaaaaaggatttagaattttttttaaatttatttaattttaaatttgaatatgtatttattttagtgagggtggagttaataaaattttaggtaaatattaatttttggaatgaatatagaattaaagatttggggtagttttatgttggattgtttgttgaattttatttaattattaaaggggttgtttgtaaggtggtatttttgtttgatagtaattaaatttgtgaaaaggtttttttatatttgattcgaaattaatatattttgagttagttattaatagatgagtatttttaagttttgtttcgggttgttataattgaaatggagttcggttgggatgattttgtgagagaaagaaatgaatttaatttataaggttttgtagtataagattgaaaaatttaataagaatttaattttaaaagtaaaaattggtttgagtttttaagtttattaatttggattgtgagaaagtattaagtattagtcgtttaaattgattataattaaaattttgatagttgtttttttttttattttaaatggtagtatgggattgaaatatgagaatgttattttttttaaaatttagtttagtgataaagttattgttttttatgatatagttaattttaaagagatttagtattaatgtgagttgaatttgtagtttgttttttaggtgttttgaagataaatgttaaaaattttagtttttattttaatggagtgttaaaattttgatttatatagttttaaattattaattttttaaatgtgtttttgaattaatttgtagaagtttatatagtaagtttataagtttttaaaaaggaagtttatatataatagtggaggtgttttgtttaattattaaaatgtttgagatttttttttaaatatttttgagttcgaaggtaatattgatagatttttttttttttttttttttattatttattttagtgataatatattattgatagaggaagttattagaattatttttaagttttagatataggagattttatgtaatttggagataagattaattattgggggttttttttggattttttttttaataattgggggttattttattagtttgtttattaaaggattatggtaagtatagaattttaatggttgttagttagtaattttttttttttttttttttattgtagatataagtttggttttattaaaaacgatgaggaaaaaagattgtattttaggattaggaggtgtgagatattttagtttttttgttttatttgcgtgggtattgttgttttattttaaaaaattttgtttaaagtaaatattttgttttaaaatgatatagtattagattttgttagatgttagaaatggatttattttaaaatttggaattgtcgtatatattttatatgtaagatagtatataagtagaaatatttaaaagtagttttatttatagattgtagtaattttgtatttttattaagataatttgttttgtgttaaaatagtaatttttaaatttttgtttattatgaaaaggtaattttaaagtttattatgtaaaattaattataaataggatttaatttatatttatagatttttttaagtattatataatttaaaaatttttgttttaaagttttgttttaattattgaaatattttaatttgtggttattaatttagtaaatttaaggaattaggttatgattaagaatttaggtggaattgatgtttgggtaattaaaataaatggtataagagtttaaaaattaaagttgtgttagtggtttttaattagaggtagtaatttgttattttagaggatgttgagaaatgtgtaggggtatttttttggttgttatatttattaggggtttttgttggtatttaagtttaaagatatttatttttgtagtgtatgggatagtttggtataatgaagaattagtttttttaaaatgtagattattttattttaagggatagggtagattattattagaagtaaaattaaaagtataagttgggtaaattgatagaatattagataggagagattaattttaattttttaaatttggttagtaaagtgtaataaaggtattgataagttttgttagtttattatagtatttgtaaattaggaattaataattgaattagatttaagggttttgttttgttatatatatttaaggtagaaaaaaagttatatgtcgattaggtatttattaagaatggttaagttgagattttggttaatagagtaagtttatatatttagagaaataatatagtggaaaatcgaaaaaaaaaaatagaaaaatttatcggtaattttttaatagttttgaatatttatagtagagttttattatttgagagaaagattggaagatttgaaagttatttttgttttttaattttagttttttaaatattgaaattttgtatattttgtgaaattttagtatgttttgtttaaggtgttaataaaattagtttgtattatgtagttattgagtgagggggagatataagttaaggattttaaattgatttttagttatagagaatttgttataagttagttttgtttgtaaaaaaaaaaaaaaaaaaagaaaaagaaaaaagtgtattttattgttttttgtattaagtaattttgtaattgtatggtagtttttttttttttaaataaatatagttgttattggttttgttgtagtagtgaatatagttaaaatacgtatattaaaaaaaaaattattaggtttttattagttattgttttatagtttatttttattagtttttttgatagatttgtatttttagtgtttcgtattgttatttaaattgttttattatgttaagtttttgttaatagttttattttttttgaaatatttgaatatttgatgattttagttttgaggagatattatttttaggtgtgtttttttagtttttgtaggtattttttttttttaatatttgtttttcgtatttttaaaaaaatttgttttagattgttttgttttgtgttagttcgttagttgattttatttttttttatgg

SEQ ID NO: 59 - DNA, 1092 bp, Artificial Sequence
  chemically treated genomic DNA (Homo sapiens)
aagttttttttttattatttaagaaggtatttaggtttttttgtgttaggttttaggtaaagtgttggattatttagtaattgggtttagtagtaggatggttttagattgaggttttagggttaaaggattatttttttttttagcgttggttcgggaaaggtaagtttcgggcgggagcgtacgtcgcgttttcgaagtttggttttttcgttacgtttattttttgtttttatttcgcgtttttttaggttttttttcggtgaatcggatgttttgttagttttttattttgcgttttcggtcgcggttcgggtttttcgtaaagtcgttgttatttcggagggtttagttagcgggttttcggaggttggtcgggtaggcgtggtgcgcggtaggagttgggcgcgtacggttatcgcgcgtggaggagatattgttttgtcgcgatgggggttcggggcgtttttttacgtcgtaggtaagcggggcggcggttgcggtatttgtttatcgggagttttttttttttttttttgttgttgttgttttgtatttagttcgggggaggatagaagaaaaaggaggtagaatggatttttttggtttttttttgtggtcgggggcgggttagggtgggtcgcgttgtttaggtagttttgtcgtgttgttaggtagtttggtcgtcggcgtgggcgatgtcggcgttggggcgggagtcgcgagggtgggaggttttggggcgttttcgggacgtggagttagtagggttttgatttgaaaaacgacggtaaagcgtgtttttgattgtttttgagtattttatattttttagatttagggcgtttttatttttagttggaagtttagtttagagtaatggtgttattaaaaggggtgtgttggatgtgaaaatattttttggaagtatttataagtttgtaggaaatatgttttttttatttttttattttgttttttttattatttattttaagaagtaatagaatttgtgtagagtgtgttttaagttatattgtatgtttatttttgtttatgttgaattcggtgtatatttgtgagaataagttt

SEQ ID NO: 60 - DNA, 1092 bp, Artificial Sequence
  chemically treated genomic DNA (Homo sapiens)
aagtttatttttataagtatatatcgagtttaatataaataaaaataaatatatagtgtaatttaaaatatattttgtataggttttgttgttttttgaaatgggtaatgaagggagtagagtaagaaaataaggaaaatatattttttgtaggtttataaatatttttaaagggtatttttatatttaatatattttttttagtggtattattgttttaagttgggtttttagttgggaataaaggcgttttgggtttgaaaggtgtgaggtgtttagaagtagttaagaatacgttttgtcgtcgttttttaagttagaattttgttaattttacgtttcggaaacgttttagggttttttattttcgcggttttcgttttagcgtcggtatcgtttacgtcggcgattaggttgtttagtaatacggtagggttgtttgggtaacgcggtttattttggttcgttttcgattataggggaaggttaaggggatttattttatttttttttttttttgttttttttcgagttggatgtagagtagtagtagtaggagaaggaagggaaagttttcggtgggtaggtatcgtagtcgtcgtttcgtttgtttacggcgtgaaggagcgtttcgggtttttatcgcggtagggtagtgttttttttacgcgcggtagtcgtgcgcgtttagtttttatcgcgtattacgtttgttcggttagttttcgggagttcgttggttgggtttttcgggatggtagcggttttgcgagggattcgggtcgcggtcgaggacgtagagtaggagattgatagagtattcggtttatcgggagaagatttggaaaggcgcgggatgggggtaggaagtgggcgtggcgagggagttaggtttcgggggcgcggcgtgcgttttcgttcggagtttgtttttttcggattagcgttgaggagaggagtggttttttggttttgggattttaatttgaggttattttgttattgaatttaattattgggtagtttagtattttatttggggtttagtatagaaagatttgaatgtttttttggatgatgaaggggaagttt

SEQ ID NO: 61 - DNA, 6271 bp, Artificial Sequence
  chemically treated genomic DNA (Homo sapiens)
  unsure 4779: n is a or g or c or t
agtggtataaatatggtttattgtagtttttattttttgggattaagtaattttttagttttagttttttgagtagttgagatgatagttgtttatcgttatgtttagtaaatttttttattttttgtaaagatacgattttattatgttggttaggttggttttgaatttttgggtttacgcgatttatttgttttagtttttaaagtgttgggattataggtttgagttatggtgttcggttatatttatggatttaattgtttttggaattaatatcgtgtaggaaaggagtaggattgagtagaaaaagttgaattaaatgtagttatagtaaatgttttagttttcggattttaagggagttttggtgttaggagagttttttagagtagttttattttgagttttgtatttgttagttagtgtagacggatttggtgagaggtagttttttttagttgaaggtaatttttggaaagggatttagttgataggtgttgataagtaatgcgtttagtagttgaggaaatgagtattttagttttgaagagtggtgtgttttttggtatgttgggatggttggttgtgttagtggagatgggggtggtgggtagaatgaagggaatattattgtaaaagttttttattttttatttatatttatttatttatttattttttaagataaggtttaattttgatgttcgggttggagtgttggaatgtaatgatattattatagtttattgtagttttgattttttgggtttaagcgatttttttattttagttttttaagtaattggaattataggtatatgttattatgtttagttaattaaaaaaaaaaattttgtagagatgaggtttcgttatgttgtttagggtggtttggaatttttgggtttaagtgatttatttattttggttttttaaagtgttgggatgataggtatgagttacggtttttagtttggaataaaatttttcgaagaaaaaattggtagagtttgttgtttgattaaaaaatagaggttgaatgagagagatgtatttaaaataatacgaaatattaagggttttttgaatattgttggatagtgtaaaatgggggaagttaggatataaatttaattttgttttattgtaaggtttatgtttttttattagattagtgttggttaaattggtgttttatgggttatatttagatagtagacgtattttgtttggttatatagtatttaaaaaatgtaaattggttgttattatgtaaaaattggaagagtttatatgtaagtttagatttttagttttttttgagtaattagaagatttagtaatattgggttaatatttttgtatggtagtaattggagttgagtgatagatattttttaaatggagagagtattttttatttggataaatggaggtgggtatatgttttttaatttattatagtttttatgtattattttttttggtattttttttttgagatggagttattttgtcgtttaggttggattgtagtagtataatttaggtttattgaaattttagttttttgggtttaagtaatttttttgttttagttattttagtaagtagttgggattatagttatgtgttattatgttcggttttttttttttttttttttttttttagtagagatggagttttattatattggttaggttggttttaaatttttgattttaggtgatttgtttgtttcggttttttaaagtgttgggattataggtatgagttatagcgtttagttttttttggtatttttgtttagtatttttgttatatgtattatgtatggtttaataaagtatataatatataataggtatttgggtatttttatttttatttattttttagagatagggttttgttttgttgtttaggttggagtgtagtggcgagattatagtttattgtagttttgatttttttagtttaagtgatttttttattttagttttttaagttgttgggattatagatgtatattattatgtttaattaatttaaataattttttttggtagaagttgggattttattatgttgtttaggttggtttgaatttttaggtttaagtaatttttttatttcggtttttaaaagtgttggtattataggtgtgagttattacgatcggtttatttggatatttaatattggtttagtagaattgaatgaatttaattggagaggaagttggggtgaagtttaggtttttgattataatgagaggtttggtattgaggggaggtaatagaatagggagtataaattaggatgaattaatgatatgttggtaggagtttgagtaaaggaagaagagtagagggttagggtttgaagtttgggtgttttattatagagttaaagaagagtgggtaatggtagattaaattagagaagaagaggagagaaaggtatagaggaattttagtaacggaatgttagggaaggtaagggagttgagggtttgggtagttgtatttagtgtagggaagaagattagggagatagataggtaaaaagttatggtaataaggaagtagttagggatttttagaggaagtatgagaaaaggagaggaaggttataggtttgaagtttagtagtgtagtagggggtattggaatattattttgggggtatgagtgagtgtttttttaggggttttatttgggagaaatatagatagatatttatttaatatttatttatttttttttagtatagttattattttgatattatttaaaagaaattagtatttgtattgtatttttaaagaagaagggataaaagatatgtttaaattgtttgtttgttttagtggaataaaatattaatttaatatgtattttggataattattaatttagagattggaaattttttttaaggatatatttttttgtatgtgggttattggttttgtggtttttttgtaggaaaattaaaattttagttttgtttttttttattatttagtgtttgtgtggtttaattggttgattagcgcgtgtttggaatgtgtaaatttattttaatattggtttaggggtttgtgtggtagtttatttttgttattttagtattttgggaggttaaggtagggggattatttgaggttaggagttttagattagtttgggtaatatagtaagattgtgtttttattaaaaaaaaaaaaaaaaaaaaaattagttaaagtagggtgatatttatttgtagttttagttatttaggagtttgaggtgggaggattatttcggtttaggagtttgaggttggagtgagttatgattgagttattgtattttattgtatagagttagattttgtttttgaaaaataaaaatatttgtttaggtaaaatgtatcgaggaagataaattttaaaattatttattttaggttaggtgcggtggtttatatttgtaattttagtattttgggaggttgaggtgggcggattatgaggttaggagtttaagattagtttggttaatatggtgaaatatcgtttttattaaaaatataaaaattagtcggttgtggtggcgtatgtttgtagttttagttattcgggaggttgaggtagaagaattattttaatcgggaggcggaggttgtagtgagtcgagatcgcgtttttgtattttagtttgggtgatagggtgagattttgttttaaaaaaaaaaaaaaaaaaattagttattttaaagtttaatgttagatatagattattcgttgttttggatgtaattttttttttggaaaattggtataatttaattatatatgaaatttttttaattttggtattggaggtatagggaaggattttgttttaggagatttatagtttatttttattgttttaggagttaaattacgttggtttatattttgattttgttatttgttaatttagattttgggtaaattaaaggtttgagggaggagtgtaggtttttagcgtttttacgggggtggggacgtgacgtatttattagtttatgaagttaatgatatgtattgaaaaggtttgtttaaggatttaaataagacgatgaatatattgaattaataatgaatgtaaggttttaaaggtgttttgagggtggtgaaatttgaattttttattaattgtgtaatagttatattaatttggatggttatgagttttgtagaggaaagttgggtttaaattttaatgttagatttggtggttagattttgattgttatcgggtttagtattgggatttaagcgatttttaaaaaaaaaaaattacggaatttttttttggttttttttttttgttttttagtagtttattaagttacgaagaatttgaaaatcggaggtcgtgtattttattttttttgagagtttaagttgagagtatagtttttttaggagattagcggtagagattcgcgcgttgggagaaaggttagttttagggcgttttaatttttaatttcgggagtaatttaaattcggaggtcggcgggggaggggatagttgtagggggcggtggggatgggagtggatgttttcgggttagttttggtattcgttagttgagtttagcgttagtttaggtgagttttacggcggtgagggacgttcgttagacggtttagaggagttagatgacgttatttttaggaggattcgtttttttattaatgaaatcggtcggcgcgggcgtatgcgcggnaggtcgttttttttttcgtttttttttttttttttttagtcgcgtttttaatttttagttcgttcgcgtttttttttttcgggtcgtggaaaggattttattttcggtggggtgttatggcggcgtttcggattgtgatggttgtggggagacggcgttagtggggagagcgattaagaggttttttttttttttcgggttttttttttttatttttttttttttagtttttttgttaacgttttttttttttttttttttttcgttcggcgttgattttttatttttattttcgtgggaatattgggagtttgtattttatagattttttttttgtttttttttttattttagttttcgtttttcgtttttttttcggtttagggcgtcggtttattttttttttcgtcgtttttcggtcgcggggaggatatggtcgcgtataggtcggtggaatgggtttaggtcgtggttagtcgtttcgacgagtaggtaatcggttcgtggcgggcgggaggtgggagcggagtgggggtggggatagagtaggtgaggggaggtaggagcggtcgtttttttcgcggttgttttaggttttggaggaaaggaagggaagggaagagaagggaaggggggataagtgggggtggttaaggcgggaggtgaggggtaggaggggatagttgggagtttgggtatttttttttttttaagtcggggggtggggttttgtttttgattagttttcgattttttattttttttattttagttttttcgtttggaaatggggatgagtgatttgggggcgtttttaggggcgcgttatttggatttaataattatttttttatttttgtttttgagtagaggtgggtaacgtttaggggttttttttttttttttttttcgtgatttttttaattggggacgagcgaattttaaggtttgttttatatattttttataggagaacgataatatttcgttttttttttagtttttttagtttttttttttggagggggaagagtagaagaaagtaaggaaggtataggtttttttattttttgttttatcgttttattttgtttcgagagttttaagtgtatatttattgtatatttttgtgatgttttataacgtcgttttttatattttgatgatatagattgttttttttttttattgtcgtttgtagtggaaatcgtggttttgaaatattttttttttttttgataattgtagttttttttttttttttttttttttttgttagcggtttgaggatgtgatgtattttcgagtgagaatgttggggagtaaaggggagaagggtgaaaggaaagtgagaaattgttttagagttatcgataatagagtaaagttagttgggatgtggttttggagcggattattttgttagtgtttgtggttgtttttgatttttttttggttgataagagaatttttattgagaatatttgggatg

SEQ ID NO: 62 - DNA, 6271 bp, Artificial Sequence
  chemically treated genomic DNA (Homo sapiens)
  unsure 1493: n is a or g or c or t
tattttaaatatttttaatgaaagtttttttgttaattaggagagagttaaaaataattataaatattagtagaatgattcgttttaggattatattttagttggttttgttttgttgtcggtggttttgaagtagttttttattttttttttattttttttttttttattttttaatatttttattcgagaatgtattatatttttagatcgttggtaaaaaaaaaaggggggggggaagagattgtaattattaaggaaggggaaggtattttagaattacggtttttattgtaaacggtaataaaaaaaaaaggtagtttgtgttattaggatatgggggacgacgttgtagggtattataaagatgtgtagtgagtgtgtatttgaagttttcggggtaggatgagacgatggagtagaaagtaagaaaatttgtgttttttttgtttttttttgtttttttttttttaggagaggaagttgaagaaattgggggaggggcggaatgttatcgtttttttatagagggtatataagataggttttagggttcgttcgtttttagttaggagggttacggagggaagaggaagagagaatttttaaacgttatttatttttgtttaaaaataaaagtaagggggtaattattaaatttagatggcgcgtttttaaaggcgtttttaggttatttatttttatttttaagcggaagggttgggataaaggggatggagggtcggaggttggttagggataaggttttatttttcgatttaggagggaaagggtgtttaagtttttagttgtttttttttattttttatttttcgttttggttatttttatttatttttttttttttttttttttttttttttttttttttttagagtttgaggtagtcgcgggggaggcggtcgtttttatttttttttatttattttgtttttatttttatttcgtttttatttttcgttcgttacgggtcggttatttgttcgtcgaagcggttgattacggtttggatttattttatcggtttgtgcgcggttatgtttttttcgcggtcggggggcggcggagggaagggtgggtcggcgttttgggtcgggaagagggcggggagcggaggttgaggtgagggaagaggtaaggagagggtttgtggagtgtaggtttttagtgtttttacgggggtggggatggggggttagcgtcgagcgggagggggagagggaaagggggcgttggtaaggaggttggggggagggggataggggaaggggattcggggaggggagggggttttttggtcgttttttttattagcgtcgtttttttatagttattatagttcgagacgtcgttatgatattttatcggaagtgggattttttttacggttcggggagagggagcgcgagcgagttagagattgagagcgcggttgggaaaggggagggggaagcgagagggaaggcggtttntcgcgtatgcgttcgcgtcggtcggttttattaatgaaaaagcgagtttttttggaggtgacgttatttaatttttttgggtcgtttggcgagcgttttttatcgtcgtggggtttatttagattggcgttgggtttagttggcgagtgttagagttgattcgggagtatttatttttatttttatcgttttttatagttgttttttttttcgtcggttttcgggtttggattgttttcggagttggaagttagggcgttttggggttagttttttttttagcgcgcggatttttgtcgttaattttttggggaggttgtgtttttagtttaagtttttagaaaaaataaggtatacgattttcgatttttaggtttttcgtagtttggtagattgttgagaaataaaaaaggaaggttaaagagagatttcgtgattttttttttttagaggtcgtttaaattttaatgttagattcggtggtaattaaggtttagttattaggtttagtattgggatttaagtttagtttttttttgtaaaatttatagttatttaagttaatataattattgtatagttgatgagagatttaagttttattatttttaaaatatttttaaggttttgtatttattattaatttaatatatttatcgttttatttaaatttttgaataaatttttttaatatatattattaattttatgaattgatgaatacgttacgtttttattttcgtgggaacgttgggagtttgtattttttttttagatttttgatttgtttaaggtttgagttgataggtggtaaagttaggatgtaaattaacgtggtttaatttttagaataatagaggtagattatgggttttttaaaataaagtttttttttatatttttaatattagagttgaaaggattttatgtgtaattgggttgtgttagttttttaggaagaggattatatttaaaataacggataatttatgtttgatattggattttggaatgattaatttttttttttttttttttaagatagagttttattttgttatttaggttggagtgtagaggcgcgatttcggtttattgtaattttcgtttttcggttgaagtgatttttttgttttagtttttcgagtagttgggattataggtatgcgttattatagtcggttaatttttgtatttttagtagagacggtgttttattatattggttaggttggttttgaatttttgattttatgattcgtttattttagttttttaaagtattgggattataggtgtgagttatcgtatttggtttggaatgagtaattttaaaatttgtttttttcgatatattttatttaggtaaatgtttttgttttttagagataaggtttgattttgtgtagtggagtgtagtggtttaattatagtttattttagttttagatttttgggtcgaagtgatttttttattttaagtttttgaatagttgggattataggtgagtgttattttgttttggttaattttttttttttttttttttttggtagagatatagttttgttatgttgtttaggttggtttggaatttttggttttaagtgatttttttgttttggttttttaaagtgttgggatgataggggtgagttattatataggtttttaggttaatgttaaaatgaatttatatattttaagtacgcgttaattagttagttaagttatatagatattgggtgataagggagaataaaattagaattttaatttttttatagaaaagttataaagttagtagtttatatatagagagatatatttttgagaaaagtttttaatttttaggttggtggttgtttaaaatatatattaaattaatgttttattttattagaatagatagatagtttggatatgttttttgtttttttttttttaaggatgtaatgtagatattaattttttttagatgatgttagaatgatgattatgttggaaagaaatggatgaatattaaatgaatgtttatttatgttttttttaagtaggatttttgaaaaagtatttatttatatttttaagatagtattttagtgttttttattgtattgttaaattttagatttatgattttttttttttttttttatattttttttgaaagtttttaattatttttttgttgttatggttttttgtttgtttatttttttgatttttttttttatattggatgtaattgtttaaatttttagtttttttgttttttttggtatttcgttgttgaagtttttttgtgttttttttttttttttttttttagtttagtttattattgtttatttttttttagttttgtggtaagatatttaaattttaggttttggttttttgtttttttttttttatttaagtttttgttagtatgttattaatttattttaatttgtattttttgttttgttgtttttttttagtgttaaattttttattatagttagaggtttagattttattttaattttttttttaattaaatttatttagttttgttgaattagtattaagtgtttaaatgggtcggtcgtggtggtttatatttataatgttagtatttttagaggtcgaggtgggaggattgtttgagtttagaagtttagattagtttgggtaatatagtgagattttagtttttattaaaaaaaattatttaaattagttaggtatagtggtgtgtatttgtggttttagtaatttgggaggttgaggtgggaggattatttgagttagagaggttaaggttgtagtgagttgtgatttcgttattgtattttagtttaggtaatagagtaagattttgtttttaaaaaataaataaaaataaaagtatttaaatgtttgttatgtattatgtattttgttagattatatatagtatatatggtaggaatgttaaataaaagtgttaaagaagattggacgttgtggtttatgtttgtaattttagtattttgggaggtcgaggtaggtagattatttgaggttaggagtttgagattagtttggttaatgtggtgaaattttatttttattaaaaaaaaaaaaaaaaaaaaaaaaagtcgggtatggtggtatatggttgtaattttaattatttattagggtgattgaggtaggagaattgtttgaatttaggaggttgaggttttagtgagtttagattgtgttgttgtaatttagtttgggcgatagagtgattttattttaaaaaaaaaatgttaaagaaggtaatgtatagagattgtggtgaattaagaagtatatatttatttttatttatttagataagagatattttttttatttaaagagtatttgttatttaattttagttattgttatgtaggaatgttgatttagtgttgttagattttttagttatttaagagaagttagagatttgaatttatatgtaaatttttttaatttttatatagtggtagttaatttatattttttaaatgttgtgtagttaaataaaatacgtttgttgtttgaatgtagtttatggaatattagtttgattagtattagtttagtgaaaaggtatgagttttatagtagaatagaattagatttgtattttaattttttttattttgtattgtttaatagtatttagggaatttttagtgtttcgtattgttttaaatgtattttttttatttagtttttgttttttggttaggtaataagttttgttaatttttttttcgaagagttttgttttaagttgggagtcgtggtttatgtttgttattttagtattttgggaggttaaggtgggtggattatttgagtttaggagttttagattattttgggtaatatggcgaaattttatttttataaaatttttttttttaattagttgggtatggtggtatgtgtttgtggttttagttatttgggaagttgaagtgggaggatcgtttgagtttaggaggttaaggttatagtgagttgtgatggtgttattgtattttagtattttagttcgggtattagagttagattttgttttaaaaaataaataaatgaataaatataaataaaaaataaaaagtttttatagtagtattttttttattttgtttattatttttatttttattggtataattaattattttagtatattaaagagtatattattttttaggattaaggtgtttatttttttagttgttgggcgtattatttgttaatatttattagttaaatttttttttaggagttgtttttagttgaagaaagttgttttttattaggttcgtttgtattgattggtagatgtagggtttagggtggggttgttttgaagggtttttttggtattagagtttttttaggattcggaagttgaggtatttgttgtaattatatttagtttaattttttttgtttaattttattttttttttgtacggtgttgattttaagggtaattaaatttatgagtgtggtcggatattatggtttagatttgtaattttagtattttaggagttgaggtaggtggatcgcgtgagtttaagagtttaagattagtttgattaatatggtaaaatcgtatttttataaaaaataaaaaaatttgttggatatggcggtgagtagttgttattttagttatttaggaggttgaagttggaggattgtttgattttaggaggtagaggttgtagtgagttatgtttgtattatt

SEQ ID NO: 63 - DNA, 4501 bp, Artificial Sequence
  chemically treated genomic DNA (Homo sapiens)
atatatttgtaagaaaagttagattagagtgaagtaaagttaggatttgatggtggcgggaagggaaggggttaatgttgttgttggatagaggggtgttattttttttagaagaatagtatgtcgtggttattattataataatagttgatataattattatgggttggggatttataagagtttttataatttttaggtaggaggtattacgaattttattttataattgaggaaattgaggtataaagaaacgaagtagtgatagtagtttttttttttttttttaatagtttggaattaagttgtttgagtcgaggttgggttttaggaggtgtggatagtatttttatttcggtaaattagattcgtttgtttataattggggagaatggtggttttgaaaaggttaatttgggagttttggggacggttgtagggaacgtacgtttattttttttaggaagtagagttaggtcgttttttttttcgtagtggtgaggacgcgtggatagtttcgcgggggcggcgggagatttgcggagtggtcgtattttaggttcgcgttaaggtcgggtagtttcgttttttgtttagttttcgcgaggtgtcgttttcggtcgaagaaattatcgcggcgttattttcgtagttcgtatttatttatttatttatttttaaataaggggggcgtttttttttttttaatttgaaattggaaatatttagaggttttgtttttaagggggcgcgttttttttttgttattttgtattttcggattagttttttttcgtaattatataggagtaatttttttgtaaggttttgtttaacgttggtttcgcgtttagttgtataatacgtagttaaagcgggggttgggttagaagtatcggttttttttttttaatatatattttcggagtttttcgtaattttttttttttttaatgataagtaattgttaggttcgtagggtgggtgttgtattgtatcgtttcgcgcgtagttggtttttagagtgtagtcggtgtaagttcgggggtttaaaagggcgggaggagtatattttgggttttttagttttgtagttttttttttgtaaagaaaagtaagtggtttttggcgcgaaagttttggcgttttttttgatttttatggaaattaggagggcggggtaaagtcgtttttttttttttttttttttttttttgtttgcgttatagttttttttttttttcgtttttcgggtgtgttagattttttagttaataatatttttcgagttttaaagcgtaggttgtgatagttatttgtttggacgcgttgggtggatgcggggggtttttgggaattgtgttggagtcgagtaagcgttagttaggcgtaagcgcgtatagattgtagttattcgaggatattttcgttttttcggtttattcggagatattcgcgtagaatcgttttcggattttttgtagtcggcgggaggtaaggagtagggtttgtaaatcgttcggcgtttagggaagcgacgagcgtcggggtaaggtaagttttggacgggattgcgacgtgcgtatcgggcgttttaatatgttcgggggattgtttttgttttcgaaataaaattatttttgggtttttttagaaaagttagttttagtttcgaaggtattttggttagaggagattcgttttaatttttttgtagtttttatcggggggagtaatggtttttgcgaaaagaaattttttcggttttagaagatttgtttgtgtttgagttgtcggagagtcggtgcgtttttattttaggttggggtttttttttaaagggtgtttttggaggaagaagagggggggattaggtagggcgaggtcgtcgcggtcgtaatttgggttacggttgttttagtttggaggagaggcggttttttcggcgatttttttcgcgcgggcgtttttgttattttcgggaataggggtttagtttttttttttttggaagaggacgttgtcgtgggtttggaagagtaggggtgggtttagagagtttttaattaagttattggtaggagtatttttgtagcgggtgaatgtcgaggggcgtttgtttaaatttggggaggggaaggatttgtggatatgggtgtttgttgttggtttttgtttagagaaaggtttttttttatttgtaaagttttttaaattttttgttattatttgtatttttgaggttgtatttttataaagggggtagaaggtattttaaatattattttcggtagttgggtcggagagtttggggttttttttgagtagtcggttttatatcgttgcgagtgcggttgtttgcgtgttcgtgagagttagaattttgtagttaggaatagtttttttttttaggtagtgttttgtgtgaatgaaatggtagtttttaaagttgcggagtttcgttattattttttgtatttgtatgtttttttttattttttgtcgtagatagtttgtatataaaaggagggcgggagggagggagcgagaggtataattttttttattttcgggagtagtgggtagagtggggggtttggagggaagattggggaatttggttagagggggcgtttattgtttattttttcggtttgtttcgtttgtttatttttttcggtgtgtttgtcggttgtagtgttggaggtcggcgtcggttttcgtttttcgcgttttttacgggaaggaagtattttcggtattaaaacgaacggggcggaaagaagtttttagtcgtcggtcgggaggcgagtcgatgtcgagttgttttacgtttattatgtcgggtatgatttgtaagaatttagatttcgagtttgattcgttatagttttgtttttattcggacgaagatgatttttatttcggcggtttcgattcgattttttcgggggaggatatttggaagaagtttgagttgttgtttacgttttcgttgtcgtttagtcgtggtttcgcggagtatagtttcgagttttcgagttgggttacggagatgttgtttgagaacgagttgtggggtagttcggtcgaggaggacgcgttcggtttggggggattgggtggttttatttttaattcggttattttttaggattgtatgtggagcggttttttcgttcgcgagaagttggagcgcgtcgtgagcgagaagttgtagtacggtcgcgggtcgttaatcgtcggttttatcgtttagttttcgggagtcggcgtcgttagttttgcgggtcgcgggtacggcggggttgcgggagtcggtcgcgtcggggtcgttttgttcgtcgagttcgtttattcggtcgtcgagtgcgtggatttcgtcgtggtttttttttttttcgtgaataagcgcgagttagcgttcgtgttcgtagtttcggttagtgtttcggcggcgggttttgcggtcgtttcgggggcgggtattgtcgttttagtcggggtttcgggggtcgttttttcgcgtttaggcggtcgttagattagcggcggcgattataaggtttttagtattttcggagaggatattttgagcgatttaggtaaagatcgaattcgggttcggttgtttttttggggtattggatttcgggtcgcgttttttttgttagtgttcgtatgttttggtttggggagtattttggaggtagtgttaggggtagagaggttttgttttttttaagttttttttcggggtaaagagaaggggttgagagaatgtcgttgtaaaaggggtgttttttaattttcgtttttattaaagttttttttatttttttttggggagtttttttttaggttattacgggtttttattcggttttttattttttttttgtagcgtagtttgaggaataaaattggagaaagttggtggttaaatcgggtgggggtttagggggttgttgggtgtattgtttggatagaaatttgttagcgtaggggtgaaagggattttttggtttaggttaggggagggaaagatattttcgagaagatttaagggttgtgtaaagttttgtttaaggcgtaggaatttataggagggttgtaatagatggttagagtcgattttttattttttttttttttttttttttttttttaaatgtcggtatttttttttttttttattttcggtgggtggtgggttatttgtttttggtgcgtggttagtaggcggcgatatgcgaggttagtaggcgggttcgggatttgaaaggttgggggtggtgggggtattttttttttttttatttagtagttggttgtaagtgtaatagtagttgtgtatatttttagggggttttttttttttagtgtgtagtggaaagtggttgtagttttgttttttagtttgaattttaggtttaatttgagatgtgagttgtatttgtaatttagtgtttttgaaggtgagggtaggtatttagtagtt

SEQ ID NO: 64 - DNA, 4501 bp, Artificial Sequence
  chemically treated genomic DNA (Homo sapiens)
ggttgttgagtgtttgtttttatttttaagggtattgggttatagatataatttatattttaaattaggtttggaatttaggttggaagataaaattatagttattttttattgtatattggaaagaggaggttttttgagaatgtatataattgttgttgtatttgtagttagttgttgaatggagggagggagggtgtttttattatttttagttttttagatttcgggttcgtttgttggtttcgtatatcgtcgtttgttggttacgtattaggagtaaatagtttattatttatcgaggatgggggaagggaaaggtatcgatatttgaaaaaaaaaaaaaaaaaagaaaaagaatagaaaatcggttttagttatttgttgtaatttttttataagtttttgcgttttaaatagggttttgtatagtttttgaattttttcggggatgttttttttttttttgatttgggttagagagttttttttatttttgcgttaataggtttttgtttaggtagtgtatttagtaattttttaaatttttattcggtttagttattaattttttttaattttattttttagattgcgttgtaaaagagaggtgggggatcgggtgagggttcgtgatggtttagaggagggttttttaggagagggtggaaggaattttagtgaaggcgagaattggagagtattttttttgtaacggtatttttttagttttttttttttatttcgaggagagatttgggggaaataggatttttttgtttttagtattgtttttaaaatgttttttaggttaagatatacgagtattaataaaggggacgcgattcggggtttagtgttttagggaggtagtcggattcgagttcggtttttatttgaatcgtttagggtgtttttttcggaggtattgagggttttgtggtcgtcgtcgttggtttggcggtcgtttgggcgcggaggggcgattttcggggtttcggttggggcggtaatattcgttttcgaggcgatcgtagggttcgtcgtcggggtattggtcggggttgcgggtacgggcgttggttcgcgtttgtttacgggaaaggggaagattacggcgggatttacgtattcggcggtcgggtgggcgagttcggcgggtagggcggtttcggcgcggtcggttttcgtagtttcgtcgtgttcgcgattcgtagggttggcggcgtcggttttcggggattgggcggtggaatcggcggttggcggttcgcggtcgtgttgtagtttttcgtttacggcgcgttttagtttttcgcgggcggagaagtcgttttatatgtagttttggaggatgatcgggttgggggtgaggttatttagtttttttaggtcgaacgcgtttttttcggtcgggttgttttatagttcgtttttaagtagtattttcgtgatttagttcgggggttcggagttgtgtttcgcgaagttacggttgggcgatagcgggggcgtgggtagtagtttaaattttttttagatgttttttttcgggggggtcgagtcggggtcgtcgaagtagaagttattttcgttcgggtagaagtagggttgtagcgagttaaattcgaggtttgggtttttgtagattatgttcggtatggtggacgtggagtagttcggtatcggttcgtttttcggtcggcgattgagggttttttttcgtttcgttcgttttaatatcgggggtgtttttttttcgtggggggcgcggaaggcgggggtcggcgtcgatttttaatattgtaatcgatagatatatcggagagggtgggtaaacggggtagatcgaggggataggtaatgggcgttttttttaattaggttttttaattttttttttaagttttttattttgtttattgttttcgaaggtggaggaagttgtgtttttcgttttttttttttcgttttttttttgtgtataagttgtttacgatagggggtgggagggggtatgtagatgtagggggtggtggcgaggtttcgtaattttggaaattgttattttatttatataaggtattgtttgggggagggggttgtttttggttgtagaattttagtttttacgagtacgtagataatcgtattcgtagcggtgtggggtcggttgtttaggggaagttttaggtttttcgatttagttatcgggaatggtatttggagtattttttattttttttgtaaaaatgtaattttaggagtgtaaatgatagtaggggatttagaaaattttgtaaataaaaaaaagtttttttttagatagagattaataatagatatttatatttataaattttttttttttttaaatttgagtaaacgtttttcggtatttattcgttgtagggatatttttgttaatagtttaattggaagttttttaagtttatttttgtttttttaaatttacgataacgtttttttttagggagggagaggttgagtttttgttttcgggaatggtaggggcgttcgcgcgaggagggtcgtcgggagagtcgttttttttttaagttggagtagtcgtgatttagattgcgatcgcggcggtttcgttttgtttaattttttttttttttttttttaggggtattttttggagaagaattttagtttggggtggggacgtatcggtttttcgatagtttaaatatagatagattttttagagtcgagggaattttttttcgtagaagttattatttttttcggtaagggttgtaaaaggattagggcgggttttttttagttaggatgttttcggggttggaattggtttttttgggaaaatttagagatggttttgtttcggaagtagaaatagtttttcgggtatattagggcgttcggtgcgtacgtcgtaatttcgtttagggtttgttttgtttcggcgttcgtcgtttttttgggcgtcgggcggtttgtaagttttgttttttatttttcgtcgattgtaggggattcggaggcgattttgcgcgggtgttttcgggtgggtcgggggggcgggggtgttttcggatggttatagtttgtgcgcgtttgcgtttggttagcgtttgttcggttttaatatagtttttaggagtttttcgtatttatttagcgcgtttagatagatgattgttatagtttgcgttttgaagttcgggggatattattaattgaaaaatttgatatattcggggggcggggagagaagggggttgtggcgtagataagggggagggagaaaggagaggaaagcggttttatttcgtttttttgatttttataaaaattaggggaggcgttaaggttttcgcgttaaaagttatttgtttttttttgtagagagaaggttgtaaagttgggaagtttagggtgtgtttttttcgtttttttggattttcgggtttgtatcggttgtattttgagaattagttgcgcgcggagcggtgtaatgtagtatttattttgcgagtttggtaattgtttgttattaaaagaaaaaaaaattacggagggtttcgggggtgtgtgttggggaggggagatcgatgtttttaatttagttttcgttttgattgcgtgttgtgtagttgagcgcgaggttaacgttgagtaaggttttgtagggaggttgtttttgtgtaattacgaaagaaggttagttcgaaggtgtaaaatagtagggagaggacgcgtttttttaggaataagatttttggatgtttttagttttaaattgaaagaagaggggcgttttttttgtttgaaaataaataaataaataagtgcgagttacgagggtggcgtcgcggtggttttttcggtcgaaggcgatatttcgcggagattgagtagaaagcggagttgttcggttttggcgcggatttggagtgcggttatttcgtaggtttttcgtcgttttcgcgggattgtttacgcgtttttattattgcggaggaggaggcggtttggttttgttttttagggggaatgggcgtacgttttttgtagtcgtttttagggtttttaagttaatttttttaaagttattattttttttagttatgggtaggcgaatttgatttatcgagatggaagtgttgtttatattttttgagatttagtttcggtttaaatagtttgattttaaattgttgaagggaaaaaggaaagttgttgttattatttcgtttttttgtgttttagtttttttaattgtgaaatggagttcgtagtgttttttatttgagagttatgaaagtttttataagtttttagtttataatagttgtgttagttattattatgatgatgattacgatatgttatttttttggggaaaataatatttttttgtttagtagtagtattggtttttttttttttcgttattattaaattttggttttattttattttggtttagttttttttataggtgtat

SEQ ID NO: 65 - DNA, 6112 bp, Artificial Sequence
  chemically treated genomic DNA (Homo sapiens)
atttataggggtagggttgtagggtatttgtaggagttgggagtttgggggatttggtggagttgggagtaattgttgttaattttttttaagagtttgtttttgaaaaaggtaatggaagggaaggaggtattgaaatggtaggtggtaggttaggcgtggtggtttacgtttgtaattttagtattttgggaggttgaggtaggcgaattaggagattaggagatggagattattttggttaatatagtgaaattttgtttttattaaaaatataaaaaattagttaggcgtggtggtgggtgtttggagttttagttattcgggagggaggttgaggtaggggaatcgtttgaatataggaggcggagtttgtagtgagtcgagattacgttattgtattttagtttgggtaatagagtaagattttgttttaaaaataaataaataaaaaatataaaaagtagttgggcgtggtagtaaacgtttgtagttttagttatttaagggattgaggtgggaggattatttgagtttgggatgtcgaggttgtagtgagttgtgttaatattattggattttagtttggttaatagagtgagtttaaaaatatatatttatatttttatatatttatatattaaaaaatataaaaaagtggcgagtgatagttgaggagattattgtagtgggaattttaggagggggtgaggaggggttcgttggtataggggaaggggtgttatagagaaagattttggtttttttggggttttggagtggtagagagagtttaggatgtttgtaaatgtatagaaattagagggtgggaatttttttgggaggtttgtttttttttatgaaggagaagatagagtaattttgttgatagggagggtagagaaggagaggtgaggggtttgagggaagaggtttggtatagaggttggggagagggaaatgagagcgtttaggagtttttggaagatgatttgggttagtagttggggttgttattagggtagttgttgggagggtagggtatttggaggttttaaatttgtattattatagatttttttttagtagggtttaattttttggatggagaggtttgggaggtgtagtagggaagttggggatgacgttgatttggggtttataatatttttttttagtaggtttaggggtttgtagttgttggtaacgggttgattttatttttgggtgaataggtgaagtttttcgggttgtttcgggaagataaaggttgggttttttggtttcggtttttgggattttgagatatagatgttttttttgggaaaggttcgttaatatattaagtaaggtttggtaagggaggaagagtttagggtttttttttgatatttgggggaaagtgttggggaagatttgggtagtatttaaaggttttagtgaatttaaagatagaaggaagatagaaggaggttggattggtaaagggaattttatagtagatattttaggtttttatatttagtagatttggagttttggaagttgaggttgtgaattttttttcggttagttggggtgtttagttttgttttgttcggtttatatggtagggatttattttgtaggttttgtgggttgggtgttggttgggtttggttagttttatttgtaatttagggggaggagtaggggagatataggatgtttttaattttttgattttttgaagtttttttggtattagttcgggtttttattatagtttttagtggaagagtttggaaggggggtagttgttttttgtttagttttttcggttttttagtaattttattttttatgttattacgtttttgcgttaagtttttttttttttaaatatttaatgtgattttttttggttagttggagtttaattgagatatttattttttagaagtttagttttgggaagtggagttaatttttggaagtttgtagattttttttagtgggttgttagattttagtatgagtatgaggtttattatggtttattgggttttaggggttagaagtgtttatgggtgttttaagtgggtgttttattatataggttttatggggggtagttagattatagtagtagatagagttgggtcgggtttatgtaggtttaaagaagtagttagtggttatttaaggtagtggtatttttgtagttttttggttggtgtttgagattagttatattttttataataattagagttatgtttatattttttattattatttagttttttttttgttaaaacgtggagtattgttttttagttttggagtttaggggtagtagataatttgagttagttggagtaggtggggtcgtttttggttggaacggttatggaaaattttaattaaagatagtatttgggagaatatttatgaaaatgtgaaagtttatatttttgatttagttgttttatagatatgatttgtgtaaaataacgtaagtgagaatatttgttatagtagtttgtaatggttaaatatagtaaaaaattttaattatttagtaatggtgattagataaattgtgatttttttatataaggaatgttatgtagttattaaaaagaatgaggtagttttatatgtgttgatgtaggatgagttataagatatatatagttaatataaaagaagagtttagaatagtgtatatgatagcgtttgtattaaatataataaatatatttgtttatttgtacgtacggttgaatttggaaggatatataagagattgttattgttttgagattgggaggtttaggggataggaacgggagggagattttttattgtgtatttgtttgaattttttgaattttgtattatgtgtatattttataatttaataaatatttatgtttttaaaagaaaataaaaaagtatttagaaataaataggttagacgtggtggtttatttttgggaggttgaggagggaggattgatatagttggggatgttaaggttgtagtgagttatgattttgttattgtattttagtttgggtgatagagtgagattttgttttaaaaaaaagaaattgggatgatatagtagtgtttttatttatattttacgtttttattgttagttatgcgatttttggataagttaatttatttttatgttttagtttttgtaaaatagtggtaattttttggaaaggttattttgaagagtaagttaattaatatgtaaagagttggaagagcgtttggtattgaattagtattatgaagtgttagatattgttattttgttgttttagattaattttaaagtaacgttatttgagttatgtcggttttttttgttgttgtttttatttaaatattttatttatttaataaataattttatttttttttttttttttttttttgagatggggtttcgtttttgttttttaggttggagtttaatgacgcgatttcggtttattgtaattttcgttttttgggtttaagcgatttttttattttagtttttcgagtagttgggattttaggcgagcgttattatgttcgttaattattttttgtgtggagatagggtcgtattatattatttaggtcggttttaagtttttggatttaagcgatttttttgtattagttttttaaagtattgggattataggtatgagttatcgtattcggttttaataaatgtttttttttttgagacggagtttcgttttgtcgtttaggttggagtgtagtgggcgatttcggtttattgtaattttcgttttttcggtttatgcgtttcggttttttaaaatgttgggattgcggatttgagttatcgcgttcggtttgaggtgatttttaataagtatagtcgtagttgtagatattttggttttgtaggaataatgaggtatggatggatttatagttggatttatggatgggatggattttcggtaggttttggacggagggaaatgttttggtttgttaagttcggtatcgagtgagatttatttataaagttaatcgtggaagttattggcggtttttttcgttttgtcgtcggggaattttgtcggtggttttcgatttgttttcgggttatttggtgatattgatttcgtagttattattttaattggcgtattcgatttaaataataattagggaatttgtgggcggttaaaggttcggttttgcggtcggtttttttaggtttttttttttgttttgtgaggttagaaagttattttttcgaggtcgttttttatgtcgagaaatatttttcgtttgaggttttgtggggtaggggaggttcgtgtattttttatagaaaatttcgtatagattcgcgattgtttttattaatagtttttaggagattgtttgtagtcggggggttgtcggttttatgttcgcgggtaagtagggataagttgtgtttttaaaagggttaacgggaatttcgcggtttttgaattttcggtgttggcggatttttcgttttagggttattaggagtcgcggcgtgagtgcgtgtcgggatcgagcgcggggtttttgaggaattttaaggttgtttaagtttacggatttagttatattggcgaatcggagatcgttcgattttattattttcgcgttttttttatagtcggcgttaaaaacgttagttttacgacgtaggtcgggattcgcgcgtttacggtttaattagcgcggattttgtataaagcgagtttcgtttttacggcgtcgttgttagtttttttttttttcgtggtcgtttcggttcgtttatttttcgtttcgcgtcgtttacggttagaggttcgcgattggtttatggggacggtcgcgagttttggttggtcggcgcggagttacgagggcgtcgtcgtcgtttttttataggcgattattgggtaggtttagtttttcgttttagtttcgagttttcgttggttttcgggtgtacgtgtttcgggatttttagtattcgcggtcgttatcgtcgtcgtttggttttttttggatttatttgcgttatttgttcgttttatatttcgtcgttattatggtgaagttcgcgaaggtaaacggttttgagcgcgagcgtagacgtgtaggtttgtttttcgaggggcgagcgcggcgtcgcggggaggagggtttgcgcgtagtttcgggcgcgttttagggcgttatgttgcgggaagtttcgcgcgattagtggggaggtttcgcggtttttggttatttggtggcgaggtgaagagtttttgtaggtgttgggggcggcgaacgcggcgggaaagatagagttattgagcgcggggagggggcgttgggtttcggggtggagagatgagattaaatttttgcgacgcgtacgagttgggattcgatttttgacgtacgtgttcgggagcgcggtttgttacgtgggtcgcgtcgcgtgggttttggaatttttagagggatcgggtgttttgggtcgggaaatggcggtatcggttttagtcggagtttcggttgcgttcggatgttttcgtttcggtttggtaagtcgatacgtggtgggtttcggaaggtggttttgtcgcgtgttttttgcgttgtgtttcgggtacgtggtggtttattaggtatttttacgtggtcgcgtcgtttttttaaggggcggggttgtttcgttgggaaaggtataagttttatgagaaaattaaggtagttatttttttaagtgttttaatgatttttatcgttaatttggatttagatgagggtggtagaataaagtatcgggatttgtagtattaaaatacggttgtgtttaattaaggtaacgggaggagaaattatttttttaggttgattttttattttagggtaggttttttgttggtaaagtttgggaggaaaaatgtgggcggttgagagtagttttttttgtattgttattaggagtagtttttatgttagttgtggtgtttggtattatgagaaatggatttgaggacggagatgatggcgtatgaatattaatggtaaaatatggggattttttagtagatt

SEQ ID NO: 66 - DNA, 6112 bp, Artificial Sequence
  chemically treated genomic DNA (Homo sapiens)
ggtttattagaggatttttatattttgttattagtgtttatacgttattattttcgtttttagatttattttttatagtgttaaatattataattaatatagaaattatttttgatggtaatgtaagagggattatttttaatcgtttatatttttttttttaggttttattaatagaaaatttgttttaaggtaaaaagttaatttgaggaaatgattttttttttcgttattttagttaagtataatcgtgttttaatattataaatttcggtattttattttattatttttatttgaatttaaattaacggtgaagattattaaggtatttaaaaaaatgattattttgatttttttatgaagtttatgttttttttagcgagataatttcgttttttaaagaggcggcgcggttacgtgggggtatttggtaggttattacgtgttcgaaatatagcgtaaaaggtacgcggtagagttatttttcggggtttattacgtgtcggtttgttaggtcggggcggagatattcgagcgtagtcgggatttcgattagggtcgatatcgttatttttcggtttaaggtattcggtttttttggagattttaggatttacgcggcgcggtttacgtggtaggtcgcgttttcgggtacgtgcgttaggagtcgagttttagttcgtacgcgtcgtaaaagtttggttttatttttttatttcgaggtttagcgtttttttttcgcgtttagtgattttgtttttttcgtcgcgttcgtcgtttttagtatttgtagaagttttttatttcgttattaagtagttagaagtcgcgagatttttttattaatcgcgcgagatttttcgtagtatggcgttttagaacgcgttcgggattgcgcgtaggttttttttttcgcggcgtcgcgttcgtttttcggaaagtaggtttatacgtttgcgttcgcgtttaaggtcgtttattttcgcgagttttattatgatggcggcggagtgtgaagcggataagtggcgtagatgagtttagaagaagttaagcgacggcgatggcggtcgcgggtgttgaagatttcggagtacgtatattcgaaggttagcgagagttcgagattgaggcgaaagattgagtttgtttagtaatcgtttgtggaaaggcgacgacggcgttttcgtgatttcgcgtcgattaattaaagttcgcggtcgtttttatgagttaatcgcgagtttttaatcgtgaacggcgcggggcggggagtaggcgggtcgaggcggttacgggagggggaggggttggtaacggcgtcgtgggggcggggttcgttttgtgtaaggttcgcgttgattgggtcgtgggcgcgcgggtttcggtttgcgtcgtgggattggcgtttttggcgtcggttgtgaggggagcgcgggggtggtggaatcgggcggttttcggttcgttaatgtggttgggttcgtaggtttgggtagttttggagttttttagagatttcgcgttcggtttcggtacgtatttacgtcgcggtttttggtggttttggagcgaggagttcgttagtatcggaagtttagggatcgcggagttttcgttggtttttttggaggtatagtttatttttgtttgttcgcgagtatggggtcggtagtttttcggttgtaggtagttttttgagagttgttaataaaggtagtcgcgggtttgtgcgaggttttttgtgagaaatgtacgaattttttttattttatagaattttaagcgggagatatttttcgatatggggaacggtttcggagaagtaattttttggttttatagggtagggagaggggtttgggagggtcgatcgtagagtcgggtttttgatcgtttataggttttttggttattatttgggtcgaatgcgttaattaaggtggtggttgcgaagttagtgttattagatggttcgggagtaggtcgagagttatcggtagggtttttcggcggtagggcgaaggaggtcgttagtgatttttacggttagttttgtgggtgggttttattcgatgtcgggtttagtaaattagagtattttttttcgtttagggtttgtcggggatttattttatttataggtttagttatggatttatttatattttattgtttttatagaattaggatatttgtagttacggttgtatttgttaaaaattattttaggtcgggcgcggtggtttagattcgtaattttagtattttgggaggtcgaggcgtatgaatcggggaggcggaggttgtagtgagtcgagatcgtttattgtattttagtttgggcgatagagcgagatttcgttttagaaagaaaagtatttgttaaggtcgggtgcgatggtttatgtttgtaattttagtattttgggaggttgatgtaggaggatcgtttgagtttaggaatttgagatcggtttgggtaatataatgcgattttgtttttatataaaaaataattagcgggtatggtggcgttcgtttggagttttagttattcgggaggttgaggtgagaggatcgtttgagtttaggaggcggaggttgtagtgagtcgagatcgcgttattgaattttagtttgaggaataagagcgaaattttattttaaaaaaaaaaaaaagaaagaaaataaaattatttgttaaatgaatgaagtatttaggtagaagtagtagtagggagagtcggtatggtttaagtggcgttgttttggagttggtttggggtagtaaaatagtaatatttaatattttataatgttgatttagtgttaggcgtttttttagttttttatatattaattaatttattttttaaaataatttttttaaaaagttattattgttttatagaaattgggatatagaggtaaattaatttgtttaggggtcgtatagttagtagtggaggcgtaggatataagtgaagatattgttgtgttattttagttttttttttttgagatagaattttattttgttatttaggttggagtgtagtggtaggattatggtttattgtagttttgatatttttagttatattaattttttttttttagttttttaaaggtgagttattacgtttggtttgtttgtttttaaatgtttttttgtttttttttgaaaatatgagtatttattgaattgtaaagtatatatatagtgtaaaatttaaaagatttaaatagatgtataataaaaggtttttttttcgtttttgttttttaggttttttagttttaaggtagtggtagttttttgtatatttttttagatttagtcgtacgtgtaaatagataagtatatttgttatatttaatataaacgttattatatatattgttttgagttttttttttgtgttaattatatgtattttgtaatttattttatattagtatatgtagagttgttttattttttttaatagttatatggtattttttgtgtggaaggattataatttatttagttattattgttggatagttagggttttttgttatgtttggttattataaattgttatagtaaatatttttatttacgttattttatataaattatatttgtagaatagttgggttaagggtatggatttttatatttttatagatgtttttttaagtgttgtttttggttggggttttttatggtcgttttagttaagagcgattttatttgttttagttggtttagattatttgttgtttttgagttttaaggttgggagatagtgttttacgttttagtagaggaagaattagatggtggtgagaggtgtgagtatggttttaattattgtggggagtgtgattagttttagatattagttaagaagttgtagggatattattgttttgagtggttattggttgtttttttgggtttgtatggattcggtttaattttgtttgttgttgtggtttggttgttttttatgaaatttgtgtagtgaggtatttatttgggatatttatgggtatttttgatttttgagatttagtaggttatagtgggttttatatttatgttaggatttgatagtttattggagggggtttgtaggtttttaaggattaattttattttttaggattgggtttttaggaaataagtgttttagttaggttttaattagttaagaaaaattatattgagtatttaaaaaagagggagtttagcgtagggacgtggtgatatgagggatagaattgttgagaagtcgaggggattgagtaggaagtagttgttttttttttaggtttttttattgaaggttatgatgagggttcgggttgatgttagggaagttttagaaggttaggaggttggggatattttgtgttttttttgtttttttttttgagttgtaggtagggttggttagatttagttagtatttagtttataaagtttgtagggtgagtttttgttatgtaggtcgagtagggtagggttgggtattttagttggtcgggagggagtttatagttttagtttttagagttttaggtttgttgagtgtgaaggtttggggtgtttgttatgaagttttttttattagtttagtttttttttgttttttttttgtttttgggtttattgaggtttttggatattgtttagattttttttaatatttttttttagatgttaaagggggattttaagtttttttttttttgttaggttttgtttagtgtgttagcgagttttttttagaggaggtatttgtgttttagggttttaggagtcggagttagagaatttagtttttgttttttcgaggtagttcgagaagttttatttgtttatttagaggtagagttagttcgttgttaataattgtaggtttttgagtttgttggaggagggtgttgtgggttttagattaacgttatttttaatttttttgttgtattttttaggtttttttatttaggaggttgggttttgttggagagaaatttgtgatgatgtagatttggggtttttaaatgttttgtttttttagtagttgttttggtagtagttttagttgttagtttagattattttttaggagtttttgaacgtttttatttttttttttttagtttttatgttaagtttttttttttaggttttttatttttttttttttgttttttttgttaatagagttattttatttttttttttatagggaaggataaattttttagagggatttttattttttgatttttatatatttgtagatattttgagttttttttgttattttaaagttttaaggaaattagagtttttttttatagtatttttttttttgtgttagcgagtttttttttatttttttttggggtttttattatagtgatttttttagttgttattcgttatttttttgtgttttttggtgtgtgggtgtgtgggggtgtgggtgtgtgtttttggatttattttgttggttaggttggagtttagtggtgttaatatagtttattgtagtttcgatattttaggtttaggtgatttttttattttagttttttaagtagttaagattataggcgtttgttattacgtttagttattttttgtattttttatttgtttgtttttgagatagagttttgttttgttgtttaggttggagtgtagtggcgtaatttcggtttattgtaagtttcgttttttgtgtttaagcgatttttttgttttagtttttttttcgagtagttgggattttaggtatttattattacgtttggttaattttttgtatttttagtagagatagggttttattgtgttagttaggatggtttttattttttgattttttgattcgtttgttttagttttttaaagtgttgggattataggcgtgagttattacgtttggtttgttatttgttattttaatattttttttttttttattgttttttttaggaataagtttttgggaagagttgataatagttgtttttagttttattaggttttttaggtttttagtttttgtaggtgttttataattttgtttttgtaggt

SEQ ID NO: 67 - DNA, 1446 bp, Artificial Sequence
  chemically treated genomic DNA (Homo sapiens)
ggagtcgttgggtttaggatggataatggttttcgttggtgtatgagatttaggttatttttttattttttgtggtttatttgtttatattgattgattgattggttgattaagatggttttgttttgttgtttaggttggagtgtagtggtgtagttataggttattgtagttttaattttttgggtttaagtgatttttttattttagtttttggagtagttgggaatataggtgtgttattatattagattaatttttatttttttttgtggagacggggttttattgtgtcgtttaggttggtttggaatttttgggattaagtaatttttttgtttcggtttgttaaagtgttgggattataggtatgaattacgggtttttattattacgttttaggaaatgtttatattggagtgtgttttttgtttttagttgggttttcgattggttattgtggtttaatggagtgtggtgtcggtagttgttagcgtttgttttttgagaggggtggcgaggggtatataggattagattgtttttattgttggatgattgggtaagtcgttttttttttttgggtttttgttttttaatatttaatattttgttgtgggttaagtgaagtttaagtttttttcgattttaatatgaggttgtttcggaatatttattttgtgttttgaatttaataatcggttgtggagggtattataggtaaatttgtattgtgagtgggttgttgttatttaattatttgatagtagttgcgaataggtgggtagtgtgttttttataggtagcgacgatttttggaggtggatttagaggtataattaagtcgcgcggcgtattagggtttaagggtatggggttttcgtagttgtggttggggtagagttggggttgtttttttttttaggagtataggcggcggtttagttttacgtttttcgtttttagttatattcggttcgcgtagtggggggtttaatagatttttttttttcgggttttagttttttcgttagtaagggcggataaggatttttttcgtttcgttagaggaggcgatcgaggggtttgagtttaggtataggtcggcgggtttaggaggcgcgaggcggatcgaattcgcgggaggagtaaagatttttgatgcgcggtcggagggcggggcggaggacgggatttacgcgattggtattttgtttttcgttttagttaatgagcggcgagggtgttttgggggcggggtagaattagtttttaagttgtagtgacgtttcggcgttattgttgcgttttatagacgtcgcgtgtattcggttgtttttaggcgttgttaggtatcgtttgggcgtcgttgttttggggttttggttcgggtttggtcggggttttttgatagcggcgggggaggcgggcgggcgtagggtgtcg

SEQ ID NO: 68 - DNA, 1446 bp, Artificial Sequence
  chemically treated genomic DNA (Homo sapiens)
cggtattttgcgttcgttcgtttttttcgtcgttgttagggaatttcggttaggttcgaattagagttttaggatagcggcgtttagacggtatttgatagcgtttgaggataatcgggtatacgcggcgtttatgaagcgtaatagtgacgtcggagcgttattgtaatttaaaggttgattttgtttcgtttttaagatattttcgtcgtttattggttggggcggagggtaggatattaatcgcgtgggtttcgtttttcgtttcgtttttcggtcgcgtattaaggatttttgtttttttcgcggattcgattcgtttcgcgttttttgagttcgtcggtttgtatttgagtttaggtttttcggtcgttttttttggcgggacgagaagagtttttgttcgtttttgttgacgagaagattgaggttcgaaaaggaaaagtttgttgggttttttattgcgcgggtcgggtgtggttggaggcgagagacgtgaggttggatcgtcgtttgtgtttttggagggagggatagttttagttttgttttagttatagttgcgggagttttatgtttttgaattttgatgcgtcgcgcggtttagttgtgtttttgagtttatttttaaaagtcgtcgttgtttatggaaaatatattgtttatttgttcgtagttgttgttagataattgagtggtagtaatttatttatagtatagatttgtttgtggtgttttttatagtcggttattaaatttagaatataaaatagatatttcgggataattttatgttagaatcggaagggatttggattttatttagtttataataagatgttaaatattggaaaatagagatttagagaaggaaagcgatttatttagttatttaatagtaggggtagtttggttttgtgtgtttttcgttattttttttagagggtaggcgttggtagttgtcggtattatattttattagattataatgattagtcgggggtttagttggaaatagagggtatattttaatgtgaatattttttaaaacgtggtggtgggggttcgtggtttatgtttgtaattttagtattttggtagatcgaggtaggaggattgtttgattttaggagttttagattagtttgggcgatatagtgagatttcgtttttataaaaaaaaataaaaattaatttggtgtggtggtatatttatgtttttagttattttaaaggttgaggtgggaggattatttgagtttaggaggttgaggttgtagtgatttatgattgtattattgtattttagtttgggtaataaagtaagattattttaattaattaattaattaattaatgtaggtaagtaaattataagggatggagaaataatttgggttttatgtattagcgagggttattatttattttaggtttaacggtttt

SEQ ID NO: 69 - DNA, 8693 bp, Artificial Sequence
  chemically treated genomic DNA (Homo sapiens)
agtttggataagatagcgagatttcgttttaaaaaaaaaaaaaaaaaaaagtataggaatgaggtattggagttagtagttgtagttttttaagagttaagttttttgtattggaggatatttagtgtatatgtgttattgatggttatggtttgagtaggtagtttgagttttttaggttgttttgagggtttttgttgatgcgagtttttattgaaaagtttagttgaggatattgtgttgaggaggttgtgggagggaggaagtatcgagtcgggtatgggagttttttcgttgtttgtgagttttttttttttgttgaattagtttttatttgattttttttaatcgttaggtgatagagattaggaagaaagaggttttatatatgtttttcgaggatgtgtttgtggagaggtttaggtgaggagaggacgggggacgtggttagggatttttagggtagttgagtaagtaggtgggtggtttgaggttaggaggggttaatgttaggaggtttagatttttgtggatttaagggtagaaggtgggttttgttgtggtttaggagttttgggtaaagtttaattttattatattattgtagtttatgtttcgagtatgtaatgttgagttatgtttgtagatgagatatagttttcgggggttttggttaagtttatgttaaatgtattttggaggagttatttttgataagatattattgtaaatttaagtaatgttttcggattatagtgggtgttgtgggttagtgttattttaatattagaggaatttaagggaaagatgttttgtaaaattaaaatgtttaatagtaggggatggttttataaattatggtttatttatatagtagataattatgataatgttttagaagaatatttaatgtaaaatatttattatataaataggttaataaaatagattatagaatagcgggtggggaaggggatatttgtgtatatttaaaaatacgggattaagttgggtgcggtggtttacgtttgtaggtttagcgatttagaagattgagtaggaggattttttgagtttatgagttcgagataattatgggtcgtaaagtaagaatttatttttataaaaaatgtttaaaaattttgttcgggttggtatagtgatttacgtttgtaattttagtattttgggaggttaaggtgggcggattatttgaggttagaagttcgagattattttggttaatatggtgaaattttatttttattaaaaatataaaaattagttaggtatggtggcgtatatttgtagttttagttattttattcgggaggttgaggtaggagaatttgtttgaatttaggaggtaaaggttgtagtgagtcgagattatgttattgtattttagtttgggtaatagagtaagattttgtttaaaaaaaaaaaaaaaaaattaggtcggttatagtggtttatgtttatgtaattttagtattagtattttgggtggttgaggcgggtagattatttgagattaggagttggagattagtttggttaatatagtaaaattttgtttttattaaaaatataaaaattagttaggtgtggtggcgtgcgtatgtaattttagttatttgggaggttgaggtaggagaatcgtttgaatttgggaggtagaggttgtagtgagttgagattatgttattgtattttagtttgggtaatagggagagatttggtttaagaaataattataataataaataaataaataaataaaattagttaggtatggtggagcgtatttgttgggaggtagagtaggaagattattttagtttggtaggttaaggttgtagtgtgttatgatggtgtttgtgaatagttattgtattttagtttgggaaatatagtgaggattttgtttttaaaaaataaaaagggggagggaagatggatttttaatttgttttatgagaatagtataattttttgatatttaaattagataagaattttataagaaaggaaaattataggtttattttatgaatattaatgtaaatgttttaaataaaatattagtaaattgagtttagtgttttttgtataaggataatatattataattaaattgggtttaatttaagaagttatggtaggtttaatattaaaaaattaataatgtaataatttattatattattagaataaaggtgaaaaattatgttatgttagataattaaaggtatttgttttaggtttttaaagaggagttagtggtataaggatgtaagggtagtggtgatttttttttagtggtattagttgaagtgagaatggtagcgttttattttggggatagaagtgacgtttatgttagacgtttgtggttttgatatgttttttgtggttttttgtggtttgttttttttttttttattggatgtgattttggttatggttttagttatattgtgtttttgtttatttttagattttggttttttaatttgtttagtgatttttttttttttttagatggagttttgttgtgtcgttaggttggagtgtagtggcgcgatttcggtttatcgtaattttcgttttttaggtttaagcgatttttttgttttagttattcgagtagttgggattataggtgtgcgttattacgttcggttaatttttgtatttttagtagagacggggtttcgttattttggttaggaatgtttttattttttgatttcgtgatttgtttaatttagttttttagagtgttgggattataggcgtgagttattgtgtttcgtttatttagtgattttaaatgtagtttaatggttttttagtttatggaggttaaagtaggttttgttgtattaaattaagaaattgggttgggtgtggtggttaatatttgtaattttagtattttaggatattgatgtggattatttgagtttaggagtttgagattagtttaggtaatatagtgaaattttgtttttattaaaaataaaaataaaaataaaataaaaaattaaaatttaaaattagttgggtatggtggtatgtatttgtggttttaggtatttaggaggttgaagtatgaggattatttgagtttaggaggtggaggttgtagtgagtagtgtttatattgttgtattttagtttgggtaatagagtgagattttaatttaaaaataaataaatagaatgagagagagagagaagaaaagaaagaaggaatttagttaaagaagttgggtttatttggattttttttggtttgttttatttgttgttattagtagttttttgaagttataaaaataatataaagtaaaataaggtaaaattattatttgtttgaaagagtttataaatttgatggtggtcgtggggtggatggaagattaaaaaaatggggatagaagtgaattagtgtaagttatttgtattgataagatggggatggatttttgtggaaggtagaggaggttatgttttatgtttttggtaggaaaagtggttaaagagggttttagagaataggggttgatggatgggttatattttgatgtgagttaagtttttggatggttggagagaggaaggatgttttagttgggggaatagtttggataatggagatttaagaaagttatgttttagtagtgtgaatgttgtggatgttgaagtgttaggatgtaaggtggagaattgggaaatggttttggaaaggggcgaaagtcgggtgatgaagtattttgtttattgtgacggagtttggattttttttgtggtttaaagggaaaggattgttgaatgtaaagttaatgttattagaaaagttgaatttataagagagttttggagtttaaaagagtattttatggggaattaggaaagttttggtatttggtagattaagtaagtgttttgatttgaagtttagtttagttttaatatttttttttatatttattatatcgtataatttggttttgtttatttattttaggttaaggtagagttttttagtttggtttgagtgttgtatttttttttttggtttgatatttggaattaaagttaagttagaattttagggttaagggggatgttgaaaattgtttgagtttttagattattttgttagtttatggtaaagggagggattagaggttatagggaaagtattttagttgttttttatagtattattttttttttatttaatggtttaggttaataggattttttttttgaggtttgggatacggaagggagttttttttaaattaggtttttggagagtaggttttaggggagtagtgtaatttatttttatatttataagacggtttttgatttttgttttttttttttttttttaaagtggaatagagagaatatgattttttacgatttttatattatagtttttaaataatggggaaatcggaggttttttcgtgtgtagacggtgatatttatcgttaaatgcgaattaggtagatgttagttttagtacgtacgtaggtaattttattttcgttttaacgattttagaggttgttcggtttgttttatacgggggtgttaagtttttcgttcgttttaagcggagatttaacgttatttataattaagttttttttgagggcgagcggttaggtgcgttttcggtaggatagtgttaattttagtttttttttagcgcgttttttcgcgttcgtttttcgtttggaagttttttttttacgtttcgcggtttttttttttttggttcggggagttgttttttgtgttgtcgggaaggttaaagtttcgcgtttattaggagagttcggtaagtatataaggatagaggagcgcgggattaagcggcggcgaaggaggggaagaagagtcgcgatcgagagaggtcgtcgagcgttttcgtttttagagagtagtttttcgagataggtaagggcgtagcgtgggggattcgtgtttttttttcgggattttttgttttcgttttcgcgatgtagtcggtcggtttcggtttcgaaggcggatttgggcgtttttggtttttcgcggtttcgagttttcgataaattttttgcgtcgattgcggtatgagaagtcgttagtagttgagttggagggtttacgttcggtttttgggcggacggtcgcgaagttgtaggcgttgtttttagggagtcggcggtttttttttttttaggggttcgcggcggttcggaggtttcgagagtttgttaggaggttttgggataattcggtttttttttttttttttgagacggagtttcgtttttgttgtttatgttggagagtaaaggggtgatttttgtttatcgtaattttcgtttttcgggtttaagcgatttttttgttttagtttttcgagtagttgggattataggtatgcgttattacgttcggttaatttttgtatttttagtagagacggagtttttttatgttggttaggttggttttaaattttcgataataggtgattcgttcgttttggttttttaaagttttggtattataggcgcgagttatcgttttcggttagttcggttttttagtattttttgtttttagtttttaggataggtgttatattttgaaagttaaattttatatacgttatcgtaaattaatgttggaaacggggtagtagagaaaaggataaaagttataatgaacgttttgtttttcggattttttcggatttagatttttgaatttttgtttttttgtttattttagcgtattcgaggtggtcgcgttatgataattatatgataattgggttaattataatgtagaatagttgggttttttttttttaagatttagttggggttaaaaataggtggtcggggcgggatttgttttagattttgaaacgtattgtttagtttcggatgttttaatagaatcggggtggacggtttatggcgtagattttgggttgagggtacgggtagttatttaggaatgattaaggtttaggtaagggggcgtttttagcgaaggagagatagtttatttggtatttggattttttaaattttttatgtttaaatggggtagggagggtttttatagaatggttggaaggagttaaggaaaataaaagtgtgtgtggattttttttgtgtgtgtgttagtttataaattttgtatagattatggttattttaatgatttattgtttttttgatgtttttgttataggattcgatgtatgtatgttatggtgtaaggataaaattcggtttttgtgtttttttaatttttataaaaggttatggttagcgtgtagttttatagtaataagtaaaatgatttgttgagtttatagagagttttttatatttatgaagttttaataagtgtagttttattataaagttaattttaggatgagtaaattttaagtttttatttttttagagttttttatttttggattataatattttttttatttaaaaaagtataatatttgatatttttttaataatttgttgttttaaaaatgatataaaaggtattatttgtttattgtagagaattgaaaatatatataagtaaatatatatatatataagtaaaatatataatataaatataagattattttttagggaagaatttgaagttttagtaatagtagttatttaattagtttagtaatagaatataagttttgagagggtgggagtgaatatgttattatattgtataatatagtatatagggtataaggaggggaaatgttttttggggttttttaggaaggtttgaagttattgtttttagtaaatggaaattattttagagtagttatttttgataagaattgaaatataattgagggaattattagatttgtaagattttgtttttttttttattaatatgttattttatatttgtatttggtgatatacgtaattattatttttttgtgattgtaatatttgggtattttttagagttaaatgtgttatggttaatttggagttttaatttaattgtttggtttattaagttttggttgtgtatttgaatagattattggtagggtataatgggaatagtttgttttttggagttaggagaggatattaaggttgattaaagttcgtttagttgtttttttagtcgaagcgtatttgggttagttattggttgttagtgttatttaatggttgttttgaaaatgtttagttttgttcggtaattttttagaagttagtatcgtgtaggtttagcgtttggggaatagggcgagggtggggtagagagaaggaagtggttttttgaagtagaaattagcgttttagaggatttttatttttaaagttttttttatataaaaaagatttggtttacgtttttttaaatgagagatttattttaggtaaatttattttaaaatgttagcgtttattaggagtgataagatatttagttatttacgttttaatgtgaattattttttttatttaattatatttttttttagtagttggttgagaagattttttgaaatttaaaatgattgtagggttggcggtgagttgattttcggtttcgaggtggttttagggggtttatttggttaagggaaatttggtagtgcgagggtagtgttggagagaggggtgggtatagggggttaggggtattatggatgttttttttttattgttttttggtgttttgattttagtttttgtttataggtatttgttggattttttaaaagtatttgtagtggttgttttattaggaggtaatttttttttggttttttttttttttatatttgtattttttttaaattttgttattttagattatatttgagagttttagagaataagatatttgatacgtgacgtgtttagaagatgagttagattttaaagaattgagatttgttttaaaaacgaagttttttaaagttattggagtttgggtaatagtgattattagagtaatttgtgtgtaggatattaaattaggttgttcgaaatgttgtttaaattggttagtggttttatttgtttttttgttaatttaatatttataggaaatagagttttagaggaatgataggattttggtggaataaaaagggaaaagattattttgagtaggagttttagggtttttcgttttttttaagttatttttatttttgagattttgtatgttagaattatagtttaatgtagtgaaataggaaagttttttgttaggagtttagttttattttgttatggatattaaagtaattgtttttttttgggttttaatttttttattttttatgggaagggttgaattaagtaatttttaaaatagtttttagttttaatttttttaggggtttcgtttaaatagaagataatagggaaatggttatagtttatttattatttttttttttttattataatttatattatcgttgtattgtatatttttttttttagtattgttgttgtttttaaaatgtttttaattttataagagagtgtgttgttaatgttggtttaaggttttttttggtgagtggttaatattgttttgttttttgtaggggttttattaattttgtttgtttttgtaga

SEQ ID NO: 70 - DNA, 8693 bp, Artificial Sequence
  chemically treated genomic DNA (Homo sapiens)
tttgtagaagtaaataagattggtgggatttttgtaaggagtaaaataatgttggttatttattaggaaggattttgagttaatattaataatatatttttttgtggagttaaaggtattttaaggatagtagtaatgttgagaaaggaggtgtgtagtatagcggtggtataagttgtgataaggaggagggaatggtgggtaaattgtgattatttttttgttattttttatttaaacgagatttttaaaaaggttaaggttggaagttattttggggattgtttggtttagttttttttatgagagatgggaaaattgaagtttaaagagagataattattttaatgtttatgataaggtaaggttaagtttttaatagagaatttttttattttattatattaagttgtagttttaatatgtaagattttaggagtgaaagtaatttgggaaaaacggaggattttgaaatttttgtttaagatggttttttttttttttattttattaggattttattatttttttgaaattttattttttatgaatattaggttgatagaaaagtaaataaaattattggttaatttaggtagtatttcgagtagtttgatttgatgttttgtatataaattattttggtgattattattatttagattttagtaattttggagagtttcgtttttaaagtagattttagttttttgaaatttggtttattttttggatacgttacgtgttagatgttttgttttttagagtttttaaatgtggtttgaaatggtaggatttgaagaggatgtagatgtggaggggaaagagattagaagggaattattttttggtggaatagttattgtagatatttttggagaatttagtaagtgtttgtgggtagaagttgaggttaagatattaggggatagtaaggagggggtatttatggtgtttttagttttttgtatttatttttttttttagtattattttcgtattgttaaattttttttaattaggtgggttttttgaagttatttcgaggtcggagattagtttatcgttaattttataattattttggattttagaagatttttttagttagttgttagaaagaaatgtaattagatgagaaaagtaatttatattaaagcgtggatgattaagtgttttgttatttttaatgaacgttggtattttaaaataagtttgtttaaaataaattttttatttggggaggcgtgggttaaattttttttatataggggaggttttggaagtgaaagttttttgaagcgttgatttttattttaggaggttatttttttttttttattttattttcgttttattttttaggcgttgggtttgtacggtgttagtttttgaagggttgtcgggtaaggttgagtatttttagagtagttattagatggtattggtagttagtgattggtttaggtgcgtttcggttaaaggggtaattgaacgagttttggttaattttggtgtttttttttggttttaagggataggttgtttttattgtattttgttagtgatttatttaagtatatagttagaatttggtggattaggtaattagattaaagttttaagttgattatagtatatttagttttgaaaaatgtttagatgttatagttatagaaaaatggtagttacgtatgttattaaatgtaaatgtaaagtaatatattagtaaaggaaaaaataaaattttataggtttgatagtttttttaattatattttaatttttgttaaagataattattttggagtgatttttatttgttagaagtaatgattttaggtttttttggaaagttttagagagtattttttttttttatgttttatgtgttgtgttgtataatgtggtaatatatttatttttatttttttagagtttatattttgttgttaaattggttagatggttgttattgttaaaattttagatttttttttgaaagatggttttgtgtttgtattgtatattttgtttatgtgtatgtgtatttgtttatgtgtatttttagttttttataatgaataaatagtattttttgtgttatttttaaagtaataaattattggggaaatattaaatgttgtgtttttttaagtagggaaagtattataatttaaaaatggaaagttttggaaaaatagaaatttgaaatttgtttattttgagattaattttatagtagaattatatttattagaattttataggtgtgaggggttttttatgagtttaataaattattttgtttgttattgtaaaattgtacgttggttatgattttttgtaaagattagaggagtataggggtcgagttttgtttttatattatgatatatatgtatcgagttttataataaaagtattaaaggaatagtaagttattaaagtggttataatttgtgtagagtttataaattgatatatatataaaaaaaatttatatatatttttattttttttggttttttttagttattttgtaagaattttttttgttttatttaaatatgaagaatttggggaatttaaatgttaagtggattgtttttttttcgttgaaaacgtttttttatttgagttttgattatttttaaatggttgttcgtgtttttaatttaggatttgcgttataaatcgtttatttcggttttgttgaggtattcgaaattagatagtgcgttttaggatttaggataagtttcgtttcggttatttgtttttaattttagttaggttttggagagaagagatttaattattttgtattgtaattgatttagttattatgtaattattatagcgcggttatttcgggtgcgttaaggtgggtaaggaaataaggatttaggggtttgaattcgaaaaaattcggaaggtagggcgtttattatgatttttatttttttttttgttgtttcgtttttaatattaatttgcgatagcgtgtatggaatttgatttttaagatgtgatatttattttggaaattgggagtaagagatattaaaagatcgggttggtcgggggcggtggttcgcgtttgtaatgttagaattttggggggttaaggcgggcggattatttgttgtcgggagtttgagattagtttgattaatatggagaaatttcgtttttattaaaaatataaaaattagtcgggcgtggtggcgtatgtttgtaattttagttattcgggaggttgaagtaggagaatcgtttgaattcgggaggcgaaggttgcggtgagtagagattatttttttgttttttagtatgggtaataagagcgaaatttcgttttaaaaaaaaaaaaaaagatcgggttgttttaagattttttagtaagttttcggagttttcggatcgtcgcgagtttttgggggagaggaggtcgtcggttttttggagatagcgtttgtagtttcgcggtcgttcgtttaggggtcggacgtgggttttttagtttagttattggcggttttttatgtcgtagtcggcgtagaaagtttgtcgagaattcgggatcgcggagagttagaggcgtttaggttcgttttcggagtcggagtcggtcgattgtatcgcgaggacggggataggggatttcggggaaagagtacgggttttttacgttgcgtttttatttgtttcgggaggttgttttttgagggcggggacgttcggcggtttttttcggtcgcggtttttttttttttttttcgtcgtcgtttggtttcgcgtttttttgtttttatatatttgtcgagtttttttggtgggcgcgggattttgattttttcggtagtataaggagtagtttttcgggttaggggaaggggggtcgcggggcgtgggaggggggtttttagacgggggacgagcgcggggagacgcgttggaaaggggttggaattagtattgttttgtcgaaggcgtatttggtcgttcgtttttaggaagaatttaattatggatggcgttgggttttcgtttagaacgggcgggaggtttagtattttcgtgtggggtaggtcgggtagtttttgaggtcgttgaggcgagggtgaagttatttgcgtgcgtgttggggttggtatttgtttggttcgtatttggcggtaaatattatcgtttgtatacggggaggttttcgatttttttattgtttggaaattgtgatgtggaagtcgtggggaattatattttttttgttttattttggggaggggaggagggagtagaagttaggagtcgttttgtgggtgtgaaggtgagttgtattgtttttttggggtttgttttttaagggtttggtttaggggaggttttttttcgtgttttaagttttaaggaaaaagttttgttaatttaaattattaaatggggagagggtgatgttgtgaagagtagttgaagtgttttttttgtggtttttgatttttttttttgttatgagttggtagggtggtttggggatttagataatttttaatattttttttggttttggagttttggtttggttttagttttaaatattagattagagagaagagtatagtatttaaattaagttaagagattttattttaatttggagtaaataaataaaattaaattgtgcgatgtggtgggtgtgggagggagtattgggattaaattggattttaaattaagatatttgtttaatttgttaaatgttagaatttttttgattttttatgagatgtttttttggattttaggatttttttgtggatttagtttttttggtgatattggttttatatttagtaattttttttttttggattataagagagatttaagtttcgttatagtagataaggtgttttattattcggttttcgtttttttttagggttattttttagttttttattttgtattttggtattttagtatttataatatttatattgttagaatatggtttttttgggtttttattgtttaagttgtttttttaattagaatattttttttttttttagttatttaggagtttgatttatattaagatgtagtttatttattagtttttgttttttgaagttttttttggttattttttttattaggggtatgaggtatgattttttttgttttttatagaagtttatttttattttgttagtgtaagtggtttgtattaatttatttttgtttttatttttttaattttttatttattttacgattattattaggtttgtaaatttttttaagtagatggtggttttgttttattttattttgtgttatttttgtaattttaggaggttgttggtggtagtagataaaataaattaggaaaaatttaaatggatttaatttttttaattgggtttttttttttttttttttttttttttttttattttgtttgtttgtttttgaattagggttttattttgttgtttaggttggaatgtagtagtgtgaatattgtttattgtagtttttattttttgggtttaagtgatttttatgttttagttttttgagtatttggaattatagatgtatgttattatgtttagttaattttgggttttggttttttgttttgtttttgtttttgtttttggtagagatagggttttattatgttgtttaggttggttttaagtttttgggtttaagtaatttatattagtattttgaagtgttgggattataggtgttagttattatatttagtttagttttttaatttaatgtagtagaatttgttttggtttttatgaattgaaaggttattgaattgtatttagaattattgggtaggcggggtatagtggtttacgtttgtaattttagtattttgggaggttgagttgggtagattacgaggttaagagatggagatatttttggttaagatggcgaaatttcgtttttattaaaaatataaaaattagtcgggcgtggtggcgtatatttgtagttttagttattcgggtggttgaggtaggagaatcgtttgaatttgggaggcggaggttgcggtgagtcgagatcgcgttattgtattttagtttggcgatatagtaagattttatttaaaaaaaaaaaaaaattattgggtaggttgggggattaggatttaaaaatgggtagggatatagtgtggttggaattatggttaaaattatatttagtggagaaaaaaaaaatagattataaggggttataaggggtatgttaagattataggcgtttgatatagacgttatttttgtttttaggatgggacgttgttatttttattttagttaatgttattagaaaggagttattattgtttttgtatttttgtattattagtttttttttgaaagtttagaataggtgtttttgattgtttgatatgatataattttttatttttattttagtaatgtggtgaattattgtattgttgattttttggtgttaaatttattatggttttttagattaaatttaatttgattatgatgtattatttttatatagaaagtattggatttaatttgttaatattttatttaagatatttgtattgatgtttatgagatgggtttgtaattttttttttttgtggaatttttgtttaatttgagtattaaaaaattatgttgtttttataaaataagttggaaatttattttttttttttttttttattttttaaagatagggtttttattgtgttttttaggttggagtgtagtggttatttataggtattattatagtatattatagttttgatttgttaggttaaagtgatttttttgttttgttttttaataggtacgttttattatatttggttaattttatttatttatttatttattattataattattttttagattaagtttttttttgttgtttaggttggagtgtagtgatatgattttagtttattgtaatttttgttttttaggtttaagcgatttttttgttttagttttttaagtagttgggattatatgcgtacgttattatatttggttaatttttgtatttttagtagagatagggttttattgtgttggttaggttagtttttaatttttgattttaagtgatttgttcgttttaattatttaaagtgttagtgttgggattatataggtataagttattgtgatcggtttaattttttttttttttttttagatagagttttgttttgttgtttaggttggagtgtagtggtatgatttcggtttattgtaatttttgttttttggatttaagtagatttttttgttttagtttttcgagtagagtagttgggattataggtgtgcgttattatatttggttaatttttgtatttttagtagagatggggttttattatgttggttaggatggtttcgaatttttgattttaagtgattcgtttattttagttttttaaagtgttgggattataggcgtgagttattgtgttagttcgggtaaaatttttaaatattttttgtagagatgggtttttgttttgcggtttatggttgtttcgaatttatgggtttaagagatttttttgtttagttttttgagtcgttgggtttgtaggcgtgagttatcgtatttagtttagtttcgtatttttaaatatatatagatatttttttttttattcgttgttttgtgatttattttattgatttatttatgtaatgggtattttatattaaatatttttttaaaatattgttatgattgtttattgtatggatgggttataatttataaagttattttttattgttagatattttggttttgtaaaatattttttttttgagtttttttgatgttgaaatgatattggtttatagtatttattatgattcgaaaatattatttggatttatagtaatgttttgttaggaatgatttttttaggatgtatttagtatgggtttggttaaagttttcggaggttgtgttttatttgtaaatatggtttagtattgtatgttcgaggtatggattgtagtaatgtgatggggttgaattttatttaggatttttggattatagtagagtttattttttgtttttgagtttatagaagtttgagttttttggtattgattttttttgattttagattatttatttgtttatttagttgttttggggatttttgattacgtttttcgttttttttttatttgggtttttttataaatatattttcggggagtatgtatggagtttttttttttttggtttttattatttggcggttgggaggaattagataagagttggtttagtagggagagggagtttataggtaacgaaagagtttttatgttcggttcggtgtttttttttttttatagtttttttagtatagtgtttttagttgagttttttagtggaaattcgtattaatagggatttttagggtagtttgagaagtttaagttgtttgtttaggttatggttattaatgatatatgtgtattaagtgttttttaatgtagggaatttaatttttaagagattgtagttgttggttttaatgttttatttttatgtttttttttttttttttttttgagacggagtttcgttgttttgtttaggtt

SEQ ID NO: 71 - DNA, 8085 bp, Artificial Sequence
  chemically treated genomic DNA (Homo sapiens)
  unsure 2545: n is a or g or c or t
gttttatgatttaattattttttaatatttttttttattaagattattatattggtgattgggttttgatatatagatttggggagaatataaatatttatattatagtatttattaatttatttagttattttattgttaggtatttatttagaaaaaatgaaaatatatgtttatataaagatttgtataatatttttatagtagttttatttataatattaaaaaaattggaaataatttagatatttatttatagttaaatggataaataaattatagtatataaataaaaagaataaaaagaattaattattgatatatattataatttagttgaattttaaaataattatgttgagtgagagaaattaaatgaaaaaaagatatattatattatatataattttaagaaataaaatttaatttatttggtatttagatttttatttttatattagttttaaataaaaagttttaaatttttttggataaatggttgattttacgattggggtaggaaatatataagatgagtttgatgagtttgtagtattttgtaatattagaaagtaggaaagtttatatatatatatatatatatataatatagagagtgggttaaggagtataagagttaattgaaaaagtttttagtgttaaaaattggaaaaatttgagtaataaagtatttatgaatttatataaagaaaagattgaataaagaagtaaatgggggagaagaagtaaattttttttatagaattttaaataaattatgtagatattttattttaaaggagggttagtataattttttatttttttatatttttttaagtgatttataatgatttttttttaaagagtatagagtatgtaaagagggaaaaaagagtaattatgtaatggagaaatttgataaatattattttagttaggtgatggagaataatattaatagttataagttatgttgataatatgtattttttatatgatgtaataaatatagtatattatttttttgatttttatttcgttaaaatttaaaattttagtttatttatgaggatatattaaattttaatagaagggtattttgtaatatattttattagtatttttaaggattgttaaggttattaaatataaggaaaatttgagaaatttttatagttaagaggagtataagatattataataattaaatgtggtgttttggatggaattttggaaaggaaaaaggatattaagtgaaaatgaagaaaatttaaataaattatgaatattagttaataataatttattagtattagtttattaattgtaataaatgtattttattaatttaaaatgttaatagagaaaattgtataaatgatatatgagtattttttatattatttgtttaatttttttgtaaatttaaaatcgttttttaaaagtaaaatttattaataaaatatttaaagtaaatagatttaaaaggtatatgtaaatgtataatttaatgtttaataaattagatataaatatttttaaaaatttaatatttggtgatagaaagtagattagtggtttgttagaaagtggtgattagtattaggggaaggggatgggatagaatagtatgaagggatttaaaaaatggtatgaggaaatttttggaggtaaagggtatgtttattattttagttttataggtttaataataaattatataatttaaatatatgtagtttattatatgataattatattttgataaagtggtttttttttttaaattatagaaaaaatatttttatatttaaatttttttttttaaaaatagtttttaggaatatttgaagttagttttattatatttgaatttaattagtgaattttgtttatttaaagatttatatatttgggaagtttttgtgttaaaaatgttaattatttagtattaaaatttatggaataatggtgatttaggatatgttggatatttttattgttgtttttttattttaagatttttaattttttggaaataatttttttagatattttgataagggaattattataattaattaaaattaagttaaatatagtttgttagatttaaaatgaggttaagtgttaattttatagtagcgatcggaaaattaaattatatggtatttgatatttaaaattatatttttaagaaggttgttatttgatgttttgggtttgggttatagtatttaattttataatattgggtaattttgtgttttagtttttttaattatgaaattgggataatagtatttattttgtgagattgttgaaggattatagttaatataggtaaaaggtttataagattatttggtaatgttgttttgattttataaattttatatattgtgtggtattagttattaggaaaatataaataaattagtgagatattattttatatatttggggggttataataaaaaagatagataaaaaatgttgttaaagatgtgaagaaattaggatttttatttattgttggtgnaaatgtaagaagtataattatttgaattatagtttggtagttattttaaagattatatttagagttgttatatgaattagtaattttatttttatgtatatatttaggagaaaggaaaatatacgttgtataaaaatttgtatatgaatgtttattagtaggattttttatggtagttaaaaggtgtaaataatttaaatgtttaataattgatagagatggataaataaaatgtggtttatttatataatgaaatattatttgttaataaaaaggagtgaaggagtgaagtattgatttatgtggaatatggatgaattttgatttaaaatagttaaattataggtataaaaagtatattagtggttgttgggagatttaggcggaaatgtggaataattgttagtgggtattgagattttagagttatatttatgttataaaattaatagtgttgatggttgtataattttgagtatatgaaaaattaatgaattgatattttgagtgagttgtatgatattggaattatattttaataaagtatggtaattgttttaagataggttggaaagagaaagtttgaaaataataataatgatattaataaattagtttatttttttagttttatatatttttgtgtttatatttgtttttgttttatttataatggtttttttgtagttgttatattatattttgttatttgatgttcggtgaatattttatatttgttttttagaattttttttattttttttttatttgtttaatttttatatatttaaaattaattagagtaaattatttattagaataattaattttaaattttagtaatttaatatgataaaggtttgttttttatttatatagtttttttttagatgatcgaggggtttaggttttttatttttagtggtttttttattttttggagttttttgtattttttatatatggttgagataaattatgagttattagtatagttagattttgaggttttataagaaaatttgtaaattatttattttgttttgaataaggtatatttaagatgatgttaaaatatttaatggttttgggttaaatatagtttatgattgtgtatttaaaatatatattgtaatatttttttttttttttattgattttatgaatttagcggggatttattttataagtttaaagataattattttttagattaagaatatttagggtaaaaagtattgtttaatatttttattgaggatgttatgatgtagtatattgtataagttggagttaaaggaaattttttttaaagtgttatttattaaaaattggaatatattttttaagataaatcgaagtgtggtatataatatttaaatttttattatagatatagaggtgttattattttttatttttaaatttttttgttacgttgaggatatttaagaggagtaggatatgttggtcgtagtaggagaaatttgaaagtatttatttttatggaatttataagggagagaattttttattttagtatcgtttttgatatatttattattttaaaagataatgtagttaaatgtttttttttgtgttaaatttttataaaattgaaattttaaaatggtgataaaaattttatttttgatagaatttatttatttttttaattagatagggtataatttttaatttgtaaaataaaacgtaatatgtttatgaggttttattttaaagaatttgttattgagagtagtatttagaataacgggtggaaatgttaattttagagttttagattttatcggtaattggggtagggaggggttttgggcggggtttttttagaggaggaggcgttgttagaaagttgtttggttagtttatagttgttattaatcggggtaagttttgttgtatttgtgcgtgtgggtggtatttttaatgagaattagttttatttgttatttgagtgaaatttataattcgaggcggttagtgttttcgtattattgggatttgagattttcggagatgattgtcgttcgtagtacggagttagtagaagttcgattttttttgggaatgggttgtatcgagaggttcgattagttttagggttttagtgagggggtagtggaatttagcgagggattgagagttttatagtatgtacgagtttgatgttagagaaaaagtcgggagataaaggagtcgcgtgttattaaattgtcgtcgtagtcgtagttatttaagtgtcggatttgtgagtattttgcgtttttagttttcggatagaagttggagaatttttttggagaatttttcgagttaggagacgagattttttaataattattatttttttttgcgttttttatttgtcgttcgttgggataaacgatagttatagtttttttgacgataggatggaggttaagggtaggagttgattagcgtcgttttttttcgttttcgatttaggaggtggagattttttcggtttagttatatttaatatttatttttttttttttttgtttttatattttcgaaatttttttttttttttttttttttttttttttggagacgggggaggagaaaaggggagtttagtcgttatgattgagttgaaggtaaagggttttcgggttttttacgtggcgggcggttcgttttttttcgaggtcggatttttattgttgtgtcgtttagtcgtaggttcgttttcggggagttagatttcggatattttgtttgaagtttcggttatatttatttttttggacgggttatttttttttcggttttgttagggataggattttttcgacgaaaagacgtaggattagtagtcgttgtcggacgtggagggcgtatattttagagttgaagttataaggggtgttggaggtagtagttttagttttttagaaaaggatagcggattgttggatagtgttttggatattttgttggcgtttttaggtttcgggtagagttaatttagttttttcgtttgcgaggttattagtttttggtgtttgtttggtttcgaatttttcgaagatttatcggttgttttcgttatttagcgggtgttgttttcgtttatgagtcggttcgggtgtaaggttggagatagtttcgggacggtagttgtttataaagtgttgtttcggggtttgttattagttcggtagttgttgttttcggtttttgagagtttttattggttcggggttttagtgaagtcgttttcgtaggtcgttgcggtggaggttgaggaggaggatggttttgagttcgaggagtttgcgggttcgtttttgaagggtaaatttcgggttttgggtggcgcggcggttggaggaggagtcgcggttgtttcgtcggggcggtagtaggaggcgtcgttttggtttttaaggaagattttcgttttttagcgtttagggtcgttttggtggagtaggacgcgtcgatcgttcgggacgttttcgttggttattacggtgatggattttatttacgtgtttattttgttttttaattacgttttattggtagttcgtattcggtagttgttggaagacgaaagttacgacggcggggtcggggttgttagcgtttttgtttcgtcgcggagtttattttgtgtttcgtttatttcggtcgttgtaggcgattttttcgattgcgcgtattcgttcgacgtcgagtttaaggacgacgcgtattttttttatagcgatttttagtcgttcgttttaaagataaaggaggaggaggaaggcgcggaggttttcgcgcgtttttcgcgtttttattttgtggtcggtgttaatttcgtagttttttcggatttttcgttggggttatcgttttcgttgtcgtcgcgagcgattttatttagattcggggaagcggcggtgacggtcgtattcgttagtgttttagtttcgtttgcgtttttttcggggtcgattttggagtgtattttgtataaagcggagggcgcgtcgttttagtagggttcgttcgcgtcgtcgttttgtaaggcgtcgggcgcgagcggttgtttgttttcgcgggacggtttgttttttattttcgtttttgtcgtcgtcgtcggggcggttttcgcgttttattttgtattcggttttaacgggttttcgtagttcggttattaggtcgtcgtgtttaaggagggtttgtcgtaggtttattcgttttattttaattatttgaggtgagggttcgggacggggtacgtttagcgcgttcgggagtagcggtttcgttggcggcggcggtcgttaatttttagttttagttttagcgtatcgttgcgtttttcggggcggtcggagagggtgggtagcgggatatagtataggggtagttgtttttttttttttttttttttttttttatttttggggatacgaaggtgggcgtagaatatattatttttggggcgtgtttttttgaaagttgtttttttgtttgttttttaatttttcgaattttttagatttcgaagtagaattaatttcgatttaaaacgtgtagcgttatattaggttcgttgtagtttagtggggtagaaagtgcgcggcgagttgggggttttatgaaatgttttttttttagaagaaggacgtttattaggagtgtttgttttggagaggagttaaggtatcgttttttcgggaggggtgggatttgagaggtggtcggttagaatcgaaagtagtattattttagggatttgaatattttagtggtttagtttttttaagaattttaagattaaaattaagtttacgtgggaaatgtttaaattgtggatttaaacgtttgttattgtattgtatcgtttttttattattgtttgttatttattataattttttttatatataggtttaaaaaatattattttgtatattgaagtaatggaatgtaaaaaaagaatgttttgtttggaattttatgttgtgaataggtaaaatagtgttagtgtattggataatattttaaaatgataaatatatatttgtttaagtaagtaatgattatagggttgtgttttaaaaatttaaaattaaaatattgtaaagtattatcgaatttttaaagttaaattatatttgttttgatttagtatatagataggaaggatataatattttatttgttaaagattaaattgtttttatataaagagttttgtagaaagatttttttttaatcgattttaattttttaggatataatattatatattaattattgtttttttatattggtgttattgatgaatggttaattatttgtaagtatggtgaatttagttacggatagtttattattaagtttagtttgtatgttttttaagtgtatatatatagttttgtttttaaaatttttttttattttgttaatattggtttaagaaatttttagtattagatagtggtgtatttaaaaataaatggagtattttgttttgtattttaagg

SEQ ID NO: 72 - DNA, 8085 bp, Artificial Sequence
  chemically treated genomic DNA (Homo sapiens)
  unsure 5541: n is a or g or c or t
ttttgaaatgtaaaataaagtattttatttatttttaagtgtattattatttaatattaaaggttttttaaattagtattaatagggtgaaaggagattttaaaaatagaattgtatatatatatttgaaagatatgtaaattaaatttggtaatagattattcgtaattggatttattatatttgtaaatgattagttatttattagtagtattaatataaaagaataataattagtgtataatattatgttttagaaagttaaagtcggttaaaaggaaatttttttataaaattttttatatagaaataatttagtttttgataaatgaaatgttatgttttttttgtttgtatgttgggttaaaataaatatggtttggttttaaaagttcgatggtattttgtaatgttttggttttgagtttttaaaatataattttgtaattattgtttatttaagtaagtatatgtttgttattttaaagtattgtttaatatattgatattgttttgtttatttataatataagattttaaatagagtattttttttttatattttattattttagtatgtaaagtagtgttttttaaatttgtatataaaaaaaattgtagtgaatagtaagtaataataagaaaacggtgtaatgtagtgataggcgtttaaatttatagtttaaatattttttacgtgaatttaattttaattttgagatttttaagaaaattgagttattgaagtgtttaaatttttaagatggtgttgttttcggttttggtcggttattttttaagttttatttttttcgggggaacggtgttttaatttttttttaagataagtatttttggtaaacgttttttttttaagaaagaagtattttataaagtttttaattcgtcgcgtattttttgttttattgggttatagcggatttagtgtgacgttgtacgttttaaatcggggttggttttgtttcggaatttggaagattcggaaagttaaaaaataaataaaaaaatagtttttagggaggtacgttttaaaaatagtatattttgcgtttattttcgtgtttttaagagtgaggagaggagggaagaagaagggaggtaattgtttttgtgttgtgtttcgttgtttatttttttcggtcgtttcggggagcgtagcggtgcgttggggttggggttgagggttggcggtcgtcgtcgttaacggaatcgttattttcggacgcgttgggcgtgtttcgtttcgggtttttattttaggtagttgagatagggcgggtagatttgcggtaggttttttttgagtacggcggtttggtagtcgagttgcgggagttcgttgaggtcgagtgtagggtagagcgcgggggtcgtttcggcggcggcggtagaggcggaggtggagggtaggtcgtttcgcgggagtaggtagtcgttcgcgttcggcgttttgtagggcggcggcgcgaacgggttttgttggggcggcgcgtttttcgttttgtataggatgtattttagggtcgatttcgaggaggacgtagacgagattgaggtattggcgggtgcggtcgttatcgtcgttttttcgggtttggatggggtcgttcgcggcggtagcgggggcggtggttttaacgggaaattcgggaaggttgcggggttggtatcggttataaggtaggaacgcggggagcgcgcggaggttttcgcgttttttttttttttttttatttttagagcgggcggttggaagtcgttatagagagggtacgcgtcgtttttgggttcggcgtcgggcgggtacgcgtagtcggggaagtcgtttatagcgatcggggtggacgaggtatagggtgaatttcgcggcggggtaaaggcgttggtagtttcggtttcgtcgtcgtaattttcgttttttagtagttgtcgagtgcgggttgttaataaggcgtgattgagaggtaggataggtacgtggatgaaatttattatcgtggtggttagcggggacgtttcggacgatcggcgcgttttgttttattagggcgattttgggcgttgagaagcgggaattttttttggggattagggcgacgttttttgttgtcgtttcggcgggatagtcgcggttttttttttagtcgtcgcgttatttagagttcgaggtttgttttttagaagcggattcgtagatttttcggatttagagttatttttttttttaatttttatcgtagcggtttgcggagacggttttattggggtttcggattagtgagggtttttagaggtcgggagtagtagttgtcgggttggtgataggtttcggggtagtattttatgggtagttgtcgtttcggagttgtttttaattttgtattcggatcggtttatgagcggggataatattcgttgggtggcgggggtagtcggtggattttcgggaagttcggggttaaataggtattaagagttggtgatttcgtaggcgggagggttgggttggttttgttcgggatttgagggcgttaatagagtgtttaagatattgtttagtagttcgttgtttttttttgggggattagaattgttgtttttagtattttttgtagttttagttttggaatatgcgttttttacgttcgatagcgattgttggttttgcgttttttcgtcggaggggttttgtttttggtagggtcgagggaagagtagttcgtttagggagataggtatggtcgaaattttaggtaaggtgttcgaggtttggtttttcgggaacggatttgcggttgggcgatatagtagtggggattcgatttcgggggagggcgggtcgttcgttacgtggggagttcggggattttttgtttttagtttagttatgacgattggatttttttttttttttttttcgtttttagggaggagggaaaagggaaggaggagggggtttcgggaatataggggtagagggaggagaaagtgggtgttgaatgtggttggatcggagggatttttattttttgggtcgggggcgggggagggcggcgttggttagtttttgtttttggtttttattttgtcgttaggggaattgtggttgtcgtttgttttagcgagcggtaagtggggagcgtaagaaaaagtagtaattgttaggagatttcgttttttaattcggggagttttttaagagagttttttaatttttgttcgaggattggagacgtagagtatttataagttcggtatttgagtggttgcggttgcgacggtaatttagtgatacgcggtttttttatttttcgattttttttttggtattaaattcgtgtatgttgtgaagtttttagtttttcgttgagttttattgtttttttattaaaattttggggttagtcggatttttcggtatagtttatttttaggaagggtcggatttttgttggtttcgtattgcgggcgatagttattttcgaagattttagattttagtagtgcgggagtattagtcgtttcgggttgtagattttatttaaatgataagtgaagttagtttttattgagaatgttatttatacgtataaatataataaggtttatttcgattagtgatagttgtggattggttagatagttttttaataacgtttttttttttagggaggtttcgtttaaagtttttttttattttaattatcggtaggatttgaaattttggagttggtatttttattcgttattttgaatgttatttttaatagtaggttttttgggatggaattttataagtatattacgttttgttttgtaaattaagaattatgttttatttaattggaaaaatgaatagattttattagaagtagaatttttgttattattttaagattttagttttgtaaagatttaatatagaggaagatatttggttatattattttttaaaataataaatgtattaaggacgatattaaaataagaaatttttttttttatgagttttataaaagtgaatgtttttaagttttttttgttgcgattaatatgttttgttttttttgagtatttttagcgtgataaagaaatttgggagtgggagatggtaatatttttgtatttatgatggaagtttggatgttgtgtgttatatttcgatttgttttaaggaatgtgttttaatttttagtaaatagtattttaaggaaagttttttttagttttagtttatatagtgtgttatattataatatttttagtagagatgttgaatagtattttttattttaaatatttttagtttgaaaagtaattatttttgagtttataaaatggattttcgttaaatttatgaagttagtagaaaaagggaagaatattgtaatatatattttagatatatagttataaattgtatttgatttaagattattgggtattttaatattattttaaatatattttgtttaaaatagagtgaatgatttgtaaatttttttgtaggattttaaggtttagttgtgttaatgatttatagtttattttaattatgtataaagaatgtagaagattttagaaggtgggggagttattagaggtaaggagtttggatttttcgattatttggggaggggttatatgagtgagaaataaatttttattatgttaggttattaggatttggagttggttgttttagtaaatagtttattttgattaattttagatatgtggaagttaggtagatagaggaaaggtaaagagaattttgggaagtaggtatagaatgtttatcgggtattaaatggtaggatataatatggtaattgtaaggggattattatgaatagaataggagtaagtgtgggtatagaagtatatgagattagagaagtaaattaatttattaatattattattgttgtttttaggttttttttttttagtttattttaaaatagttattatgttttattgaggtgtaattttagtattatatagtttatttaaagtattagtttattgattttttatgtatttagagttgtgtaattattagtattattaattttgtaatatgagtatgattttaaaattttaatatttattagtagttattttatattttcgtttaaattttttagtagttattaatatgttttttgtatttgtgatttggttattttggattaaggtttatttatgttttatatgaattagtattttatttttttatttttttttattgataaataatattttattgtatggataaattatattttatttatttatttttattagttgttggatatttgggttgtttatattttttggttattatgaaaaattttgttaatgaatatttatgtataagtttttgtgtagcgtatattttttttttttttggatatatgtataggagtggaattgttggtttatatggtaattttaggtgtggtttttggagtaattgttagattatggtttaaatgattgtattttttatatttntattagtagtgaataagggttttagtttttttatatttttgataatattttttatttgttttttttgttatagttttttaagtgtgtgaagtggtattttattgatttatttatatttttttgatggttaatgttatatagtgtatagaatttgtaaaattaggatagtattgttaggtagttttgtaagttttttatttgtgttaattgtaattttttaatagttttataaaataggtattgttattttaattttatagttgggaaaattgaggtataaggttatttagtattataaagttaagtattgtaatttaaatttaagatattaaatgatagtttttttaggagtgtgattttaaatgttagatgttatataatttgatttttcggtcgttgttgtaaaattggtatttggttttattttaaatttgataaattatatttggtttgattttggttggttataataatttttttgttagaatgtttggggaggttgtttttaaaagattgaaaattttgaagtgggaaaataataataaagatgtttagtatgttttaaattattattattttataaattttgatgttgggtgattagtatttttggtataggaattttttaaatgtatgaatttttgaatgaataaaatttattgattaaatttaggtgtgatggggttaattttaaatatttttgaagattgtttttggagaagaggatttaaatgtggaagtattttttttatagtttggggaaaaaaattattttattaagatatagttgttatataataagttgtatatatttaaattgtataatttgttgttagatttgtgaaattaaaatgataaatatattttttgtttttaaaagtttttttatgttattttttaaatttttttatattgttttgttttattttttttttttagtattaattattattttttggtaagttattaatttgttttttgttattaaatattaggtttttaaaaatatttatatttgatttattaaatattaaattatatatttgtatatgttttttaggtttgtttgttttagatgttttattaatagattttatttttgggaaacgattttggatttatagaaaaattgagtagataatatagagaatgtttatatattatttgtataattttttttgttagtattttaaattaatagggtatatttgttataattaatgaattaatattgataaattgttattaattaatatttatagtttatttagattttttttatttttatttaatgtttttttttttttttaggattttatttaggatattatatttaattgttatgatgttttgtgttttttttggttgtgagagttttttagattttttttgtatttgatgattttgatagtttttaggagtattggtgaggtatattgtaagatgtttttttattgggatttgatgtatttttatgagtagattagggttttgggttttggcggggtggaaattaaagaggtaatgtattgtatttattatattatatgaagggtatatattgttaatatgatttatgattgttaatgttgttttttattatttggttgaagtagtgtttgttaggtttttttattgtatagttatttttttttttttttttgtatattttgtattttttggaaggaaattattatgagttatttaaggaagtgtgggggagtagggagttatgttagtttttttttggagtggagtatttatataatttatttggaattttgtgaggaagatttgtttttttttttttatttatttttttatttagttttttttttgtatggatttatgaatattttgttgtttaaatttttttagtttttggtattgggggtttttttagttgatttttgtgttttttgatttattttttgtattgtgtgtatgtgtgtgtatgtgtggatttttttattttttggtattataagatgttatagatttattagatttattttgtatattttttgttttagtcgtagaattagttatttatttaaggaagtttgagattttttatttgaaattggtatagaaatgaagatttgggtgttaaataaattaggttttattttttagaattgtatataatatagtgtattttttttttatttggttttttttatttagtataattattttgagatttagttaaattatagtatgtattaatagttaattttttttattttttttatttatatattatagtttgtttatttatttaattgtggataaatatttgagttgtttttaatttttttggtattataaatagagttattatgaaaatgttgtataagtttttgtatgaatatgtgtttttattttttttgggtaaatatttagtagtgaaatggttggataaattagtaggtgttgtgatatgagtgtttgtgttttttttaaatttgtgtgttaaaatttaattattaatgtgatagttttagtaggaggaggtgttggggagtgattaggttatggagt

SEQ ID NO: 73 - DNA, 9021 bp, Artificial Sequence
  chemically treated genomic DNA (Homo sapiens)
tgtttagtttagggtttgtgaatgtacgaatcgatattttgtatttagttattttggtggggaggtggagaatttttgtgtttagtttagggattgtaaatatattaattagcgttttgttaaaatagattattcggttttattaattagtaggatgtgggtggggttagataaaagaataaaagtaggttgtttgagttagtagtggtaagttgtttgggtttttttttatattgtggaagttttgtttttttttgtaataaattttgttgttgtttattttttgggtttatattgtttttatgagttgtaatatttattacgaaggtttgtagttttattgttgaagttaatgagattacgaatttttcgggaggaatgaataatttgagacgcgttgttttaagagttgtaatatttatcgcgaaggtttgtagttttatttttgagttagcgagattataaatttattagaaggaagaaatttcgaatatatttgaatattagaaggaataaatttcggatacgttatttttaagaattgtaatatttatcgcgagggtttacggttttatttttgaagttagtgagattaagaatttattaatttcggatatattagttattagggaggttgaggtgaggggattatttgaatttaggaagtcgagggtgtagtgagtcgagattatgtcgttatattttagtttgagtgatagagtgagattttgtgttaaaaaaatagaataaaataaaataagaacgttgaataggttgtgtgttaattttgagatggagtttagatttaagaatgattttgaggtttagatttatatttaagaggatgattttagtttggtatttataggttttttaggtattttagatgtattttgttttgaattaagttttttgtttttgaatttgttttttttggtaaatagtattaagggggttagaaatttgggggttgtttttatttttttttttttattatgtatttttaatgggtggttggatttgtggttgtattttcgtgattttttagtttttttttagtgatggttttaggtgggtttttattttgttttttaaatggtttttttgttttgagttttattttatttgtttttagtttatttattgagttattttagagattattttgattttttgtggatatttttttggtggttttttttttttgttagttagaaattgtttttgattgtatgtaataaatgtggttacgttatttaattaaataaaggtttatttttttcgtgatgaaaagtatatagataagtagtttatttttatcgataattattgagggttttttatgatttttatagtaatgaaatgtgtatttatagtataaagatatataattttaaggttttaatataattgggtttaagtatagtattttttgttttagtttttaattgtttaggtgattttattgtgtagttagggttgataaatattgtatttaggtttagtgtttttgatttgtagttgaggtttagagagaattattgaaattgtagttttagttatttgggaggttgaggttggagaattgtttaagtttagcggggtgaggttgtagtgagttaagattgtattatcgtattttagttcgggcgatagagtaatattttatttaaaaaaaaaaaaatttttggtttatttttttgtttattttttaattatagaggtttttaaatatgaatttttatttttaggaaggttgaaatgatatattataagcggtttagttatttgtacgtgtcgttatttgatttaaggtatttatttttttttattatttttgataaagttgaattgtttatatgtgttatatttttttttttttttaattttttttttttttttttttttttttttttttttttttttttttttttttttttttttttttttttttttttttttttttttttttttttttttttttttttttattttttttttttttttttgatagggtttgtttgttttgtttttttaaattttggggtttaagtgtaaaggttttttttatttgatttttttattttattttatttaagttagatattttacgatgatgatgatgattattgttgagataggattttattttgttgtttaggttggagtgtaatggtgcgattataatttattgtagttttaattttttgggtttacgcgatttttttattttagttttttaagtagtttggattataggggtgtattattatgttcggttaattatatgtgttagatttaatttacgttttagggttttaaataattaaggttttattattttgttttaataaatatatttttataaagatttggaaggtaggttgaaatgtggaatttttggattttttttagttttacgtagaagggtagtagtggagagttggttgtttgttcgtttttggtttttttttttttttttatttttgttttttgtggtattgggtagggtttacgtttaaggttagtagtgtatttaataagggatagtttttgtgtggtttgtttaggattttatatataggtttagggttttttgggtaggaaattttaggattcgggtatttaagtggtgttttaaatagtggtttttggtcgggtgtggtggtttatatttgtaattttagtattttgggaggtcgaggttggtagattatttgaggttaggagttcgagattagtttggttaatatggtgaaattttatttttattaaaaatataaaaatttagttaggtatggtgtgtacgtttgtagttttagttattcgggaggttgaggtaggagaattatttgaatttagtaggcggaggttgtagtgagttgagattgtattattgtattttagtttggtgatagagtgagattttatattaaaataaatatataaataaataaaaatagtgatttttaattgggagtgatttggtaacgtttggaattatttttggttattttagtttggtagggagggatagggtattattggtatttagtgagtaggggttagggattttattgaatattttatagtgtataggatagtttttatagtaaagaattgtttggtttaaaatgtttatagtgtttatattcgatgttttgtattaggaagatataaatatttttaaatattatagagttaaattttttatttttgttttagtagagatgatatttttgcggggggagtatttttttggttttaatatatttttttttttatgggagatgatgttagaagagggatagaataggacgattattttacgaaggtattatttaggtattattagatcgttttaaaagaagagtaatttattgttttaaagtagttttttcgtgtttgtgggcggattttttggtaagtttataatgaattgaaatttgtcgaattttttggaatttaaagaaattttagttttgggtaaaggttttttggttagtatttgtattgtttatgtaatcgtttagaatatacgaattatttggagattattattaaatataataggtaaaattgtaaatatgtatattttttagaggatgataaaaaaatgtgaattgtatttttttgatagaggatgtattagagtttgagggtttaaatagcgtaaataataaataagtaaataaatcgatagtagtgtattttaaacgaggttggaatagtttttattgttgttttatattggattttaattaagttttagtattttgttatatttaatattaagtattaggttggacgtggtggtttatgtttgtaattttagtattttgggaggtcgaggtgggtagatggttggtttgagtttaggagtttgaaattagtttgggtaatatggtaaaattttatttgtatttaaaatataaaaattagttaggtgtggtggtatatgtttgtggttttaggtatttgggaggttgaggtaggaggatggtttgaatttaggaggtggaggttgtagtgagttatgatggcgttattgtattttagtttgggtgatagagcgagattttgttttaaaaattaaataaataattttttcgtttcggataaaagtagtttgtattatttttttattttataatatgtttttgaaatattttttttgaaaggtaagttatatttattatttttgttgtatggaggtattataaattattttattattttattttttttgagtgttgtggtttttaggttagataaaaacgtaggtgatgtttagaagttaattagttgtcgtttggttatttgtagggttgtggttttgttaaataggaaaaatataaaaagaatatcgaattttgttaattaaataagaaattttatattaaggattaagaaaattgtaggggaagaaaaggtaagtttcgggattgaggtgtagcgattttttatatttttagaaaattaaaaaataagataaaaaaatgaaaattataaaagtatttattttggggcgttttaattgttgagtaataaatgagacgttgtggttaaatttagttataattaatgatatttttagataaagtgattttagatttttaaagcgtattttgtttatattattttgttaatttcgcgtattgtaatcggcgggttacgttttcgtgaaaagaaggttgttttttttatatttcggggttttggacgtttttcggttgcggggcggggggagttttcggcgtacgcggttttttggtttcgtttttagttattttcggttattcgcgattcgaggttgtcgtagggggcgggttgagcgcgtgcgaggcgattggtttggggttagagtgggcgaggcgcggaggtttggtttataaagtagtcgcggagacggggtgttggtttgcgtcgtagttttttgtagcgtttggggttttcgttgtagttttcggaattaggatttcggcgtggtttagcgagttatggcgacgaaggtcgtgtgcgtgttgaagggcgacggtttagtgtagggtattattaatttcgagtagaaggtaagggttgggacggaggtttgtttgcgaggtcgtttttattcgttcgttttttcgcgtatttttgttaggagcgggtcgttcgttaggtttcggggtcgttttggtttagcgttcggtttcggttcgtgtcgttcggtcggtgttttcgtttttagcggtgcggtgtttaagtgttgagttatcgggcgggttcgggcgcggggcgtgggatcgaggtcgtcgcggggttgggtttgcgcgtggcgggagcgcggggagggattgtcgcgggtcggggaggggcgggggcgggcgtgttgttttttgtggtttttgggtcgtcgtcgcgggtttgtcgtggtgtttggagcggttgtgttcgttttttgtttggtcgtgttttcgtttttgagggtttcgcggatatcgagtggcgtagtgttaggtttagttcggggatggcgattgcgtttgggttcgtttggtgttttcgtattttttttcgtttttcggttttagcgttttaggttagggagttttcgtttttgtatagttttaaggttaggaatggtttttatatttttaaaaggttttggaaaataaaaatacgtaatagagatcgtttgtgtgatattttgtagggaagtttgttggtttttgttttaggttatgattgggttgtaagggtagagaaggtagttttgaatagaggttttttttttttttttaagtttcgggagttagaggtttaattgatttttttggggatttttgagggtagtgattttaattttgggtgtatagttagtttatttgaagattttattaaaaatatattagagtttaattttcgattaattatattaaaatttgttttagtgtagggtgagtattgttgttttttgaaagtttttaaaagtgattttgatgtgtatttacgattgagaattgtcgtttgaggatagtgggtggagtttcgtatttggaaattagaagatttggagtttttattatatcgaattggtatttaataattgttgtcggagtattttttaagttatattttcgtaaagtggttttaaaattgttttgttagtaggtaggttgttaagatggttagagataaatttttgaacgatttttgtaaaatatatagaaatatttttagaatttttattagtaaaattataaaacgtgttgtaaggaaggtgtttgtgataatattgtttttagaattttagtgaagttattaattggtggaaaatttttttttgtattcggtttaaaaattatgagggaatatttattatacgaatgagatttagtttttaaaggggtttatagaaacgtgagaggataggaatagttagtttgtgtaaatgtttgaaatatatgtgagggagataatgagtttagtttttttttttaataggtttttagattttttggaaaaggttttttggtatttgattttattttgttgttttatttgttagatttttttttgtttttttttatttttttttatataatttattagtattagtgttttgttttttagattaagtttcgttttgtcgtttaggttggagtgtagtggcgcgattttagtttattgtaattttcgttttttaggtttaagtaatttttttgttttagtttttcgggtagttgggattataggcgcgcgtcgttacgtttggttaattttttatattttagtagagacggcgttttattatgttggttaggatggtttcgatttgttgacgtcgtgatttattcgtttcggttttttaaagtgttgggattataggcgtgagttatttcgttcggttattagtgttatttttaagacgtttttgaggaattttttttttttggttattgagaatttatgtatgaatttaggttttttattttttttgagtagtttgtatagtttttttttttaagcgtttgatttcgttttgtttggtgttcgttgtatttgagaatgagttttggatagtggagtattttagttttttagatatgtagagataatatattggttattagttatttggtttggtttatttcgtgtttaaaattttggattttttgttagtttttatagattagaattttttacgtattaatttagtttttttagttttttttgaagaatttttggagatttttttatattgagtttttattagtttaggatagtattgttgtagtagtttatatattttttcgttttttaggtttgtgttatttatttaagtttatagtttggtttttgtagggttgtattcgagtatagttatttagatgttttgaatgtattatcggttaaatggaggttttaaagaatttgttgtttttggttttgtgtttttgataatagagtgtttgagggataatttttatatttgagtttttttaaaattaaaggttgtagaagagttatagtatttattgttaaaaagaaaagaatttaaaaaggtagtaattgttaggatattttatttgagtaatgatattttttagtggaaagttatattttaagggttaatgttttttaattgttggtcgtatttgaaaataaattaagttaaaaataagagatattgatatgttgtatgacggtgtggtgtggatgttgtgtttattttagttttgagatttagttgtaatttttttgatttttgtatgtagttacggagtattattatttgttattattatttgaatggttatattgtttgtttttattttggtagagtggaaaggttatttaggttttagtgtttgaaaagattttagaaagtagtagtacgtttggttagattagaattagtttttttttgggggtagtggaatataatattttttgattgttaattaaaaatatttgtgatagtcgggcgtggtggtttacgtttgtaattttagtattttgggaggtcgagacgggtggattacgaggttagtagatggagattattttggttaatacggtgaaatttcgtttttattaaaaatgtaaaaaaattagtcgggtgtggtggtgggcgtttgtagttttagttatttaggaggttgaggtaggagaatggtatgaatttgggaggcggagtttgtagtgagtcgagattatgttattgtattttagtttgggcgatagagcgagattcgttttaaaaaaaaaaagaaaaaaatttatgatggatatttaaaaatatttattgagtggggagtggagagtaggggttttagggtagtttgttggatatttttagggcgattttttttttttttttttttaaagttaagtgagtatgttatatggaaaagggtgtgcgtggagaaaaagtaaggggttttagagtgtaggatgagatatatattttttgggttaaaaaggttgaggtaggagaatggcgtgaattcgggaggcggagtttgtagtgagttgagattatgttattgtattttagtttgggcgatagagcgagatttttgttttaaaataaaaaacgtttatatgtatatgtatatttaatatgtataaatataatttatttaaaagtatttattatataaataggtatttatattatttatttattgtaatagttaaagtttatgaagtatttaatattgatgtgtaggtatttattttgtttgttattttattaggtgttttttatgttatttaattatgaagtttggttatagggtgtttgtgtattgagtgtgggaataagattattattttttttttgaggatataggtttagagtagttaagtagtttgttggaggtttattggttagaaagtggttagtttgggatttggatatagatttttttatttttaagtttggttgttttttattttattgtgaggggtaaaggtaaattagttgttttttttgtttagaaattttttttaattttgtattttttttaaagg

SEQ ID NO: 74 - DNA, 9021 bp, Artificial Sequence
  chemically treated genomic DNA (Homo sapiens)
tttttaagaaaagtgtaaagttggagagagtttttgaataaagaaaatagttgatttatttttattttttatagtgaagtaaaaagtagttagatttgggagtggaaaaatttgtgtttaaattttaggttgattattttttagttagtgaatttttagtaagttgtttaattgttttaggtttgtgtttttaaaagggagatggtaattttgtttttatatttaatgtataagtattttgtggttaggttttatgattaaataatataaaaagtatttaatagagtggtaagtaaagtgagtatttatatattagtgttagatattttataggttttgattattatagtaaataggtaatgtaagtatttatttatgtagtaaatatttttgaataggttatatttgtatatgttgaatatatatgtatatgtaaacgttttttattttgagataagagtttcgttttgtcgtttaggttggagtgtagtggtatgattttagtttattgtaagtttcgtttttcgggtttacgttatttttttgttttagtttttttaatttaaaaggtgtatgttttattttatattttggagttttttgttttttttttacgtatatttttttttatatggtatatttatttgattttaaaaaaaaaaaaagaaaaagtcgttttggaaatgtttaataggttattttgggatttttgttttttattttttatttagtgagtgtttttaagtgtttattataagtttttttttttttttttttgagacgagtttcgttttgtcgtttaggttggagtgtagtgatatgatttcggtttattgtaagtttcgttttttaggtttatgttatttttttgttttagttttttgagtagttgggattataggcgtttattattatattcggttaatttttttgtatttttagtagagacggggttttatcgtgttagttaggatggtttttatttgttgatttcgtgatttattcgtttcggttttttaaagtgttgggattataggcgtaagttattacgttcggttattataggtatttttaattagtagttagaaaatattatattttattgtttttaggagaggattgattttagtttaattagacgtattattgttttttgaaatttttttaagtattgaaatttaggtaatttttttattttattaaaatgaaagtaagtagtatagttatttaggtaatggtgataggtaatggtgtttcgtggttatatatagaaattaaggaagttataattagattttaggattaaaataaatataatatttatattatatcgttatataatatgttagtgttttttgtttttagtttggtttgtttttaaatacggttaatagttaaggggtattaatttttaagatgtgattttttattggaaaatattattgtttaaatgaagtattttggtaattgttgtttttttaaatttttttttttttgataatagatattgtgatttttttataatttttaattttggaaaaatttaaatgtgaaagttgttttttaaatattttgttattaagagtatagggttaaaaatagtaggttttttgaaatttttatttaatcggtaatatatttaggatatttaagtagttgtgttcgggtataattttgtagggattaggttatgaatttaagtgaataatataggtttgggaagcgaaaaaatatatgaattgttatagtagtattgttttgggttaatgaaggtttagtatgaagagatttttaaaaattttttaagagaagttaggaaaattggattaatacgtgaaaaattttgatttgtaaaaattagtaaagagtttaagattttaaatacggaataggttaagttaagtagttgatagttaatgtattatttttgtatatttggaaagttggaatgttttattatttaaggtttatttttaggtataacgggtattaaataaaacgaagttaggcgtttaaaagaaggaattatgtaagttgtttagggaaggtggaaaatttgggtttatgtatggatttttaatggttagggagaagggattttttagaggcgttttaagaatagtattggtggtcgggcggggtggtttacgtttgtaattttagtattttgggaggtcgaggcgggtggattacgacgttaatagatcgagattattttggttaatatggtgaaacgtcgtttttattaaaatataaaaaattagttaggcgtggcggcgcgcgtttgtagttttagttattcgggaggttgaggtaggagaattgtttgaatttgggaggcggaggttgtagtgagttgagatcgcgttattgtattttagtttgggcgatagagcgagatttggtttgaaaaataaaatattagtattggtgaattatgtggggagaagtaaagagggataaaaagaagtttgataaatgaaatagtaaaatggagttaaatgttaaagaattttttttagaaaatttggagatttattaaagaaaaaggttaaatttattattttttttatatatattttagatatttatatagattaattgtttttgtttttttacgtttttgtaaatttttttaaagattgaattttattcgtatagtaaatatttttttatgatttttaagtcgagtgtaagagaaaattttttattagttggtaattttattaaggttttggggatagtgttattataagtattttttttgtaatacgttttgtaattttattgataaaagttttgaaaatatttttgtatattttataagagtcgtttagaagtttgtttttgattattttagtaatttgtttattggtagagtaattttaaagttattttacgaaaatgtggtttaagaaatgtttcgataatagttattaagtgttaattcggtgtaatggaaattttaggttttttaatttttaaatacgaaattttatttattgtttttaaacgatagtttttaatcgtaggtgtatattaaaattatttttggaaatttttaaaaaatagtaatatttattttgtattaggataggttttgatgtaattggtcggaggttgggttttggtgtatttttagtaagatttttaaataagttaattgtgtatttaaagttaagattattgtttttaaaaatttttaaaagggttagttaaatttttggttttcggagtttaggaggaggaaaaggatttttgtttaaggttattttttttgtttttgtagtttaattatgatttagaatagaggttagtaaatttttttgtaaagtgttatataaacggtttttgttgcgtatttttgttttttaaagttttttaaaaatataaaaattatttttagttttagagttgtataaaagcgaagattttttgatttagagcgttgaagtcggaaagcggagagggatgcgaagatattaggcgggtttaggcgtagtcgttattttcgggttgggtttggtattgcgttattcggtgttcgcgggatttttaggaacgagaatacggttaagtaagggacgagtatagtcgttttaggtattacgatagattcgcggcggcggtttaaggattatagagggtagtacgttcgttttcgttttttttcggttcgcggtaattttttttcgcgttttcgttacgcgtaggtttagtttcgcggcggtttcggttttacgtttcgcgttcgggttcgttcggtgatttagtatttgggtatcgtatcgttgggggcgaaggtatcgatcgggcggtacgggtcgggatcgggcgttggattagggcggtttcgaggtttggcgggcgattcgtttttagtaaaggtgcgcggggggacgagcgggtgggagcggtttcgtaaataagttttcgttttagtttttgttttttgttcgaaattgatgatgttttgtattgggtcgtcgttttttagtacgtatacggttttcgtcgttataattcgttaggttacgtcgaggttttggtttcgaggattgtaacggaaattttagacgttgtaggagattacgacgtaaattagtatttcgttttcgcgattattttataggttagattttcgcgtttcgtttattttggttttaaattaatcgtttcgtacgcgtttagttcgttttttgcggtagtttcgggtcgcgagtggtcgggaatgattgggggcggggttaaggggtcgcgtgcgtcggagatttttttcgtttcgtagtcgggaaacgtttagaatttcgaaatgtggagaaaataattttttttttacgggggcgtggttcgtcggttgtagtacgcgaaattggtaaaatgatgtaaatagggtacgttttgaaaatttgaagttattttgtttagaaatgttattagttatgattgagtttggttatagcgttttatttgttatttagtaattgggacgttttaagatggatgtttttgtagtttttatttttttgttttgttttttagttttttgagggtatagaaagtcgttatattttaatttcgggatttattttttttttttttgtaatttttttagtttttagtatagagttttttatttggttggtagaattcggtattttttttatattttttttgtttggtaaggttataattttatagataattaaacggtaattagttggtttttaggtattatttgcgtttttgtttggtttaaaggttataatatttaaggagggtagaatggtgaaataatttatgatgtttttatataataggaatgataaatatgatttattttttaagggaaatattttaaaaatatattgtgaaatgagaaaatagtgtaaattatttttgttcggggcgagggggttgtttgtttgatttttgagatagggtttcgttttgttatttaggttggagtgtagtggcgttattatagtttattgtagtttttattttttgggtttaagttatttttttgttttagttttttaagtatttgggattataggtatgtgttattatatttggttgatttttgtattttgggtatagatggggttttattatgttgtttaggttggttttaaatttttgagtttaagttagttatttatttatttcggttttttaaagtgttgggattatagatatgagttattacgtttagtttagtatttaatattgagtatggtaaaatattgagatttaattgaagtttagtgtgaaataataatagaagttattttagtttcgtttggagtatattattatcgatttatttatttatttattatttacgttatttagatttttagattttaatgtattttttattagagaaatataatttatatttttttattattttttaggaagtatatatatttgtagttttgtttgttgtatttggtagtagtttttagataattcgtatattttaaacggttgtataaatagtgtaaatgttggttaaagggtttttgtttaaggttaaagtttttttgggttttaggaagttcggtagattttagtttattgtaaatttgttaagggattcgtttatagatacgagagagttgttttgggatagtgaattattttttttttgagacggtttaatgatgtttgggtggtgttttcgtaggatggtcgttttgttttgttttttttttggtattattttttatggagaaaagaatgtgttgaagttaagaagatgtttttttcgtaagaatattatttttgttagaataggggtaaggaatttaattttgtgatatttaagagtatttatatttttttaatgtagggtatcgaatgtgggtattatggatattttgggttagatagttttttgttgtggaggttgttttgtatattgtaggatgtttagtagaatttttagtttttatttattagatgttagtaatattttgtttttttttgttaggttgggataattaaaaataattttagacgttgttaaattatttttagttaagaattattgtttttatttatttatgtatttattttgatatggagttttattttgttattaggttggagtgtagtggtgtaattttagtttattgtaattttcgtttgttgggtttaagtgatttttttgttttagtttttcgagtagttgggattataggcgtgtatattatgtttggttaagtttttgtatttttagtagagatggggttttattatgttggttaggttggtttcgaatttttgattttaagtgatttgttagtttcggttttttaaagtgttgggattataggtgtgagttattatattcggttaagaattattgtttagaatattatttgagtattcggattttggaattttttgtttaaagagttttgagtttgtgtataggattttgaataggttatatagggattgttttttgttgagtatattgttagttttgaacgtaggttttgtttagtgttataaggagtaggggtggggaaaggaggaaaggttaggggcgggtaggtagttagttttttattgttatttttttacgtagaattgaaagaagtttaagaattttatattttaatttgttttttaggtttttatgaaggtatatttgttaagataggatgatagagttttggttgtttggaattttggaacgtgggttgaatttggtatatgtaattagtcgggtatggtggtatatttttgtagtttaagttatttgggaggttgaggtaggaggatcgcgtgggtttaggaggttgaggttgtagtgagttgtgatcgtattattgtattttagtttgggtaatagaatgaaattttgttttaataataattattattattatcgtggagtatttaatttaaataaaataaaatagggaaattagatgagagggatttttgtatttgaattttagggtttaaagaagtagaataggtaaattttgttagaaagaagaaaagagagtgagagagaaagagaaagaaagagaaagagagaaagaaaaagaaagagaaagaagaaggaaggagggagggagggaagaaagggaggagggaaggagggaaggaattagagaaagaggagaatgtggtatatgtagatagtttaattttgttaggaatggtgaggaggaatagatgttttaaattagatggcggtacgtgtagatgattaaatcgtttgtaatgtgttattttagtttttttgagagtgaaaatttatgtttggggatttttgtggttaaaaggtgggtaaaaaggtagattagaaatttttttttttttagatggagtgttgttttgtcgttcgggttggagtgcggtggtgtagttttgatttattatagttttatttcgttgggtttaggtaattttttaattttagttttttaagtagttgggattgtagttttaataattttttttagattttagttgtaaattaaaggtattgggtttagatgtagtgtttattaattttggttgtataatagaattatttgggtagttgaaaattaaaataaaaaatattgtgtttaggtttaattatattaaaattttaaaattgtatatttttatattgtaaatatatattttattgttgtaagagttataagaaatttttaatggttatcgatggaagtaggttgtttatttgtgtattttttattacgagaaaaataaatttttatttggttaaatagcgtaattatatttgttatatgtagttaaaagtaatttttaattgatagagaggagaagttattagaggggtgtttatagggagttagaatggtttttggaatagtttagtgggtggattgagagtagatggggtgagatttaaggtagagaggttatttgggagataggataagagtttatttaaggttattattggaagaaagttgggagattacggaaatgtaattataagtttagttatttattagaggtgtatggtgagagagggaaggtaagggtagtttttaggtttttagtttttttggtgttgtttattaaggaaagtaggtttaaggataaagggtttaatttaggatagggtgtatttgaagtgtttgaagaatttataagtgttaggttggaattatttttttggatatgggtttaagttttaggattatttttaagtttggattttattttagaattaatatatagtttatttaacgtttttgttttattttgttttgtttttttgatataagattttattttgttatttaggttggagtgtaacggtatgatttcggtttattgtattttcgattttttggatttaggtgatttttttattttagtttttttagtagttggtgtgttcggaattggtgggtttttggttttattgattttaagaatgaagtcgtggattttcgcggtgagtgttatagtttttaaaggtggcgtgttcggagtttgttttttttgatgtttagatgtgttcggagttttttttttttggtgggtttgtggtttcgttggtttaggagtgaagttgtagattttcgcggtgagtgttatagtttttaaggtagcgcgttttaagttgtttatttttttcggggggttcgtggttttattggttttagtagtgaagttgtagattttcgtggtgagtgttatagtttataaaggtagtgtggatttaaagagtgagtagtagtaagatttattgtaaagaaagataaagtttttatagtatggaaggggatttaagtagtttgttattgttggtttaggtagtttgtttttatttttttatttggttttatttatattttgttgattggtagagtcgagtggtttgttttgatagggcgttgattggtgtgtttataatttttgagttagatataaaggttttttatttttttattagagtagttagatatagagtgtcgattcgtgtatttataaattttgagttagata

SEQ ID NO: 75 - DNA, 6074 bp, Artificial Sequence
  chemically treated genomic DNA (Homo sapiens)
ttttagttttttatagttttttgatttttttttttttgattttttatatttttttttttttattttttttttgtttttgttaattattattattttatttttattaatattattaagtgtatttgtttgagtatttttgggtgtttgatttaggatttttttaggggtatttttgttggggtaatttttttagtttttagaagggtatggttgtgtggttgagattgttgaggaaagtagtaaagataggaggatagaattgaatgtaaagttattttgtttttaagtacgtttaatggaatggttttatagtagttgcgtttaattttgtgggtattgttattgtattttgtcgtttaggaagtttataaattatataatgttttttacgtggtagttatttggtggttttgagttttagagattttgatttagtattttgattaggatatggagttgtttggattattagtggaatattaatttttatattttaatattgggttttagagttattttgtgaaattttttttggaaaggaaagatttgagttttaattttaattttaatgtgtattttaaacgtaggtttgagagttgggggatggtagatgttaagtagaaggttagattaatttttggataatattggtaacgaaaattacgtaggtagttgagaataaagtaaatgttttttatttttttttatttcgtttattatgttggtgatgaaaattgtaaaaatgagtttagtataaggttttttatttttttttttggtaagagataaggaatatattaatagttaaggttttagagggagttgatatttagataatagatttttttttttaaattttttaatatattaaaatttttttattttttttaaatatagttttttagagtttttaataaaattttttttttttttttttatatatagatgatattttttttttgttttttttttgtattaggtgttttattttgttttttttttgagtttggttgtttgttgttgttatttaggaaggttttgtagttatttgaattagtttagttattgttttttggggtttgattgtgggaattgtaatttttttaatgttgggtttatggttgtgtttttttttaaagaatgtttgggttgtttaatttttagtattttgggtaattgttgatttaaaatagtaagtttagttggtttgaattatttagggaaggttttggtgtttatagttttataattatttttataaatgaattaggaaggaaggggaggttgattatagtgaagaagagggttttttaaatatattttttataataagtatgtaggagaaaggaaagggaaaattgatagggcggtttatcggtttttagtagagtataatatagtttttttgtttgtatagggaggagaggttgtgattggttttttatagaagagattatattgagtttaaggttagttgtagtaagtgtgtgtaaaggtagtttaggtagatttttagtgggaaggttatataattattaggttttacgtgtagagaaataggagttgtagtggttacgcgagatagatgtagtgtttgtaggtgaaggcgtatatttgagtttttatatagttttaaggggttatagttggaattttattcggtttagagagtgaggtgttttaatataaaatgttatattattttttaggaaaaatgattgttttgttttaaatcgcgttttgttaattttttttttattttttttatattatagttgagaaataattttatattttttgatttatttatgaaaatattttttataggaagaggtatgtacgtgtatgtatatgtatatgtttaagtaaagaagttgatatgaaaatgataatataaagatagtggtaaggaattaagataagggaaaggtgtgtttattgagggagtttttttttaaataataggtagttttgttgatgttaaatattatgttaagtatgtaaataaatttttgtatttagtatttatattaatttaatgagttaagtattatttttattgaaaatgtggaaatcgaggtagtatagtagagaagttagtatataagttttagaattagtttgttttgtttttaaaattaagttttgttttttattggttgtgtaattttgggtaagttattaaatttatttagttttgattttttttttataaaaggggatgggatttattttataagattattgtgaggattaaatgagatatataaaatataaaagatagagtattaataatttaggatattaggttttttttatgattaaacgtttaaaaattattttaatttagtttattaaaaaaatgatttttaagttaaaaaaaaaaaaaaaaatatttagtttttgatgatttgtttgatttgaatgaattggagggttataaaattatagatatggattagtttttgaaaattttggagggagaattaatgatttttaagtattagaatgtattttgatttggatattttttagtttgtaagatggtaagttatttttttttttttttttttttttttttttttttttttgagacggagtttcgttttgtcgtttaggttggagtgtagtggcgggatttcggtttattgtaagtttcgtttttcgggtttacgttatttttttgttttagttttttaagtagttgggattataggcgttcgttattacgttcggttaattttttttgtatttttagtagagacggggttttatcgttttagtcgggatggtttcgattttttgatttcgtgattcgttcgtttcggttttttaaagtgttgggattataggcgtgagttatcgcgttcggttattttttttttttttttttttttttttttgagatagagttttgttttgttatttaggttggagtgtagtggtataattttggtttattgtaatttttgttttttaggtttaagtgattttcgtgttttagttttttaagtagttgggattatagacgtacgttattatgtttggttaattttttgtatgtttagtagaaatggggggttttattatgttgtttaggttggtttcgaatttttgagtttaagtaatttatttattttagttttttaaagtgatggtattataggtgtgagttattatgtttggtttgtaagttattttttgatttaaaatattttttaattatgaaggaaattgatttgattttgttatttttttttatttttgattttgggggtaggggatagataagtagaaattgttgaatatgatttttagtcggttgggtagttattttttagttatagtgagtttgatttgcgtgttttagtaggaagtaaggagttaggtttttttttagttttggggaataggagaagggtgggggaatttttgatttttttttttttgtagttaaagtagattagtttagggaggagatagggaaattattagagtaggttaagattaatttgaaggaagtgggagttagggataatttattaaaggaagtgtatgtgtgttttgtatatgtatggggtggattaaggaaaagatttattttaaaagaataaagtatgtttcgataaatttattgaaaggaatgatttatattggtgttttttgtttaaatgttgagattaatggtttggtgttttttttttgaaattaggttgttttatttatatgaaataaattgggtagaggttaatcgtgagagtttgagtttttttaagtaaatagtaaaagattttttaggtttaatagtttttatttttatttttaaggaaagtggatttattcggagtacgtaggttagaggaggtaggagaagagggttagttcgtgagtttcgggtatttggagaatatgaatttttcgggtgtattgtttttatgagggttatcgaggaatttatggattttttatttttcgtttagaatgttttttttttattttttttatttttttaaattttagtattaggggttattttagagttataaattttgaaaggattatttaggtgattcgggtttatatatttttttttcggggtatatttggtggtaggttagtaggtttttggttttagttggtggtgttatataattagattcgttatagagatttattttttattagttttaggttagaagtacgaagattgattttaacgatgtggtttgtttgggaggtaaggcggtaggcgttgttagaattgatgggaattgtggtataggtgggaaatttggtttaataaattttttattgatttaggggattattttttttgagttaagttttggtaagcggtcggcgaaatttataggttttttttttggttgcgtttttagtttttagtttttttcgttttagagatgttttaggagcggtttttcggtgtaggtaacgggtgttcgggcggtttcgtttcgtcgtttagagtttggaagtcgttattgcggtttaggataattcggttacgcggtcggcgtcgatttcgtacgttggagttcgttgtcgtacggcgttggtagtcgggggtggtgtttgaagttaggcgttttttgttttttcgtcggttcgggtgttcggttcgcgtcgttaggttttgggattttaggtcgtttcgtttagtagttcgcgttttgttcggtgcgtttagcgttttcgttttttattttaaatttttattttttgtgtttttaggggggtatttttatcggggcgggaggggggggttagttgtgtttcggtcgtcgagtggcgaggaggtgacggtagtcgtttttttattttcgttcggcgggtagcgttgcggggcgagtgttagtagagaggcgttcggtttttttttcgttttttcgcgtcgggggtaggttttgtttagtttgcgtttttttttttcgtatcgcggcgtcgtttcgttattcgggtatcgtaggtagggtaggaggttggagagtttgttgttcgttcgttcgtaaaatggttttttcggttggatagttcgttttgttcgttttgggtacgtacgtcggttgcggcgttttttgcgtcgcgcgatattttgtttttttcggttttcgtcgagttttttttttcgggggtttttgcgttcgtttgggagagtggagagaagcgagtagttttaatgggttggcgtttgggaggtaaggggagttattaagaatgataaagaggggattgttcggtcgagcgtcgaggttttttcgggaaagtggttgtttgggtcgtgcgtgagaatatttgggaaggggaagcggagtgtgaacgggtttgaattttaattcgtcgtagttgtgtgtttgtttagatatatgtttatatttatttgtttatttggttgtttttaagttcggtttagtcggcgtcgttggcgtgtagattgggtcgtttcggaacgggggtcggcgtttaattttttggtcgggttttgtttgcgtttttttggtattttttgtttatttttaagttttagcgacgagtagagatgtttaagatcggtagaggcgttttcgatttttttttagagtttttgagttttgggggtaggttttggatttttgggcggattaatggtttttttaattaatttttttgggagaagtggtttcggtgttcgtcgagggtaggagcgaaattttagatcgagtgttgttagttttttttgagtatgtttttggaaatgaaggagggatgggaaaggtgaggggaagttaaatttttttttcgggtcgggtttgcggagcggtgcgttttttggcggtgaagtttaagggtttgtttggacgcggtgagggcgtagcgtcgcgcgttttttggttaatttttgttttttgtgttggtgggtttttttggtgttgagatagttgattaatagcgtaggtgttttggttattgttagtttttcgtgaagtgaattgttcgttcgatatgtttcgagtttaattcgtatagtatgcggttcgttgtagggtggttagagtttgtggaaagttatggaattt

SEQ ID NO: 76 - DNA, 6074 bp, Artificial Sequence
  chemically treated genomic DNA (Homo sapiens)
gagttttatggttttttatagattttaattattttgtagcgagtcgtatgttatacgggttaaattcggggtatatcgaacgaataatttattttacggaagattagtaataattaggatatttgcgttattgattagttattttaatattagagagatttattagtataaggggtaagaattggttaggaggcgcgcggcgttgcgtttttatcgcgtttagatagatttttgaattttatcgttaaaaaacgtatcgtttcgtagattcgattcgggagaggggtttaatttttttttattttttttattttttttttatttttaaggatatatttaaaggaaattggtaatattcggtttagggtttcgtttttgttttcggcggatatcgaaattattttttttagggaagttaattaaaggaattattaattcgtttaaaaatttaaaatttatttttaaagtttaagagttttgaaaagagatcgagggcgtttttgtcgattttgaatatttttgttcgtcgttggggtttagaggtgggtagggggtgttaaaggggcgtaggtaagattcggttagagggttagacgtcggttttcgtttcgaggcggtttagtttatacgttagcgacgtcggttgagtcgggtttggaggtagttaggtaagtaggtaggtgtaggtatgtgtttgagtagatatatagttgcggcggattaaagtttaagttcgtttatatttcgttttttttttttaggtgtttttacgtacggtttaggtagttattttttcggggaagtttcggcgttcgatcggatagttttttttttgttatttttaatgattttttttgttttttaggcgttaatttattgagattattcgtttttttttatttttttaggcgggcgtagaaattttcggaaaggggaattcggcggggatcgggggaagtagggtgtcgcgcggcgtagggggcgtcgtagtcggcgtacgtatttagagcgaatagggcgagttgtttagtcgaggggattattttacgggcgggcgggtagtaggttttttagttttttgttttatttgcggtgttcgagtggcggagcggcgtcgcggtgcgggggaaaaagacgtagattaggtagggtttgttttcggcgcgggagggcggagggaggatcgagcgtttttttgttggtattcgtttcgtagcgttgttcgtcgggcggaaataggaaggcggttatcgttattttttcgttattcggcgatcggggtatagttgatttttttttttcgtttcgatgggggtgtttttttgagggtatagagggtgggggtttggggtaaggggcggggacgttgagcgtatcgagtagggcgcgggttgttgggcggggcgatttgggattttagagtttggcggcgcgagtcgggtattcgggtcgacgaaaaggtaggaagcgtttgattttagatattattttcgattgttagcgtcgtgcggtagcggattttagcgtgcggggtcggcgtcggtcgcgtagtcggattgttttgggtcgtagtggcggtttttaggttttaggcggcggagcggagtcgttcgggtattcgttatttatatcgaggggtcgtttttggggtatttttggggcggggaaggttggaggttggggacgtagttaggaaagggatttgtgagtttcgtcggtcgtttgttaagatttggtttaaggaaagtggttttttgaattaatgaagaatttgttaaattaggttttttatttgtgttatagtttttattaattttggtaacgtttgtcgttttattttttaggtaggttatatcgttaagattagttttcgtatttttggtttgggattgataaaaaatgggtttttgtgacgaatttggttatatggtattattagttgaggttaaaagtttgttagtttgttattaagtgtatttcgaaagaggggtgtgtgggttcgagttatttgggtggtttttttaggatttgtggttttgaggtggtttttggtgttggaatttggggaggtggaggggatagagggaagatattttgggcgaagagtggaagatttataggtttttcggtgatttttatggggatagtatattcgggagatttatgttttttaggtattcggagtttacggattgattttttttttttgttttttttggtttacgtgtttcgggtagatttattttttttgaaggtgggggtgggggttgttgggtttggggaattttttgttgtttatttggggaggtttaggtttttacggttgatttttgtttagtttgttttatgtaagtagagtaatttagttttaagaaggaagtattaggttattggttttaatatttgggtaggaagtattagtgtaaattattttttttaatagatttgtcggagtatattttgtttttttagggtaaattttttttttggtttattttatgtatgtataaggtatatatgtattttttttagtaggttgtttttgatttttattttttttaggttgattttgatttgttttggtggtttttttgttttttttttaaattagtttgttttggttatagaaggggaggaattaggggtttttttattttttttttgttttttaggattagagaaggatttgattttttgttttttattggaatacgtaaattaagtttattgtggttgagggatggttgtttagtcggttgagggttatgtttagtagtttttgtttatttgttttttatttttaaagttagaggtggagggaagtagtagaattaagttaattttttttatgattggaaaatattttaaattaagaggtaatttgtaggttaggtatggtggtttatatttgtaatattattattttgggaggttgaggtgggtggattgtttgagtttaggagttcgagattagtttgggtaatatggtaaaattttttatttttattaaatatataaaaaattagttagatatggtggcgtgcgtttgtagttttagttatttgggaggttgaggtacgagaattatttgaatttgggaggtagaggttgtagtgagttaagattgtgttattgtattttagtttggatgatagaataagattttgttttaaaaaaaaaaaaaaaagaaaaaaagagatggtcgggcgcggtggtttacgtttgtaattttagtattttgggaggtcgaggcgggcggattacgaggttaggagatcgagattatttcggttaaaacggtgaaatttcgtttttattaaaaatataaaaaaaattagtcgggcgtagtggcgggcgtttgtagttttagttatttgggaggttgaggtaggagaatggcgtgaattcgggaggcggagtttgtagtgagtcgagatttcgttattgtattttagtttgggcgatagagcgagatttcgttttaaaaaaaaaaaaaaaaaaaaaaaaagaaaaaaagagataatttgttattttataaattaaagagtatttaaattaaagtatattttaatgtttgaaaattattaattttttttttaagatttttaaaagttggtttatatttgtggttttataattttttaatttatttaagttaaataggttattaggggttgggtgtttttttttttttttttaatttaaagattatttttttggtaaattgaattgaaatgatttttaaacgtttagttatagaggaaatttaatattttaaattgttgatgttttattttttgtattttatatattttatttaatttttataataattttatgagatagattttatttttttttataagagaagaattaagattgagtgaatttagtaatttatttagaattatatagttaataaagggtagagtttgattttgaaagtagaataagttggttttgaggtttatgtgttggtttttttgttatattgtttcggtttttatatttttaataaggataatgtttaatttattgggttgatgtgagtattaaatgtaagaatttatttgtatatttagtataatatttgatattaataaaattatttattatttaaaggaaaatttttttagtggatatattttttttttgttttagttttttattattatttttatgttattatttttatattagtttttttgtttgagtatatgtatgtatatgtacgtgtatatttttttttatgggaaatatttttataggtgaattaggaggtatgaagttgttttttagttgtggtgtgaaagaaataagaaaaaaattgatagaacgcgatttagagtaaagtaattattttttttaaagggtggtgtgatattttgtattggaatattttattttttgagtcgagtgaaattttaattgtagttttttgaagttgtgtggagatttaggtatgcgtttttatttatagatattgtatttgtttcgcgtggttattgtagtttttgtttttttgtacgtggagtttgatgattatgtggtttttttattaagagtttgtttggattgtttttgtatatatttgttgtagttggttttgagtttagtataattttttttgtgagaagttaattatagttttttttttttgtgtaaataagagaattatgttatgttttattgagagtcggtaaatcgttttgttagttttttttttttttttttttatatgtttattatagagggtatgtttaaagagtttttttttttattgtgattagttttttttttttttttgatttatttgtggaagtgattgtggagttatgagtattagagttttttttgaataatttaggttagttgagtttgttgttttagattagtagttatttaagatattggggattgaatagtttagatattttttgggaggaagtatagttatgggtttagtattgaaggaattataatttttatagttaagttttagggagtagtaattgggttggtttaggtggttgtaggatttttttgggtgatagtagtagatagttaggtttagagggaaaataggatggggtatttggtgtagagggagggtaaaggagagatgttatttgtgtatgagaaagaaagagggaagttttattaaggattttggagaattgtgtttagggagagtgaggagattttaatgtgttaagggatttagaaaaagaaatttattgtttaaatattagttttttttggggttttagttattagtgtgttttttattttttgttaaaggaaaaagtaggaaattttatgttgggtttatttttatagtttttattattagtataatgggcgaggtaagaagagataagaggtatttgttttgtttttagttatttgcgtgattttcgttgttagtgttgtttaaagattggtttgattttttgtttaatatttgttattttttagtttttaggtttacgtttggaatgtatattgaagttgaaattgaagtttaaattttttttttttagaggagattttatagaatggttttaaagtttagtattgaagtgtggaggttggtgttttattagtggtttaagtagttttatgttttagttaaggtgttaggttagagtttttgggatttagggttattaggtggttattacgtgaaagatattatatagtttgtgaattttttagacgataggatgtagtagtagtatttataggattgagcgtagttgttgtgaagttattttattaagcgtgtttggaggtaggatagttttgtatttaattttgtttttttatttttgttattttttttagtagttttaattatatagttatatttttttggagattggaaagattgttttagtaggagtgtttttgggaaagttttaaattaagtatttagaaatatttaggtaagtatatttaatgatgttgatggaaatagggtagtgatgattaatagaagtaaaagagagataggagaaagaaaatatgaagaattaaggaaggagaaattaaagaattatagagagttgaaa

SEQ ID NO: 77 - DNA, 2205 bp, Artificial Sequence
  chemically treated genomic DNA (Homo sapiens)
ggatttttagtaggggagtaatatggatttggaaagattattttggttgttgtgtggggatagataagacggtgggagtttagaaaggaggttgggttggaaattttgggatagaaatttagagaggaaaagattgggtttggggtttttagtgagtattagggagtggggaattagtaggagtttggtttttatttatttttttttttttttttttttttttttttgtaggttggtttcggttttatttttaggtgtggttttaggatagttttggtcgttgttagtttgtaggttatggattttgttatgtgtttagtagttcgggtatttattagttggtttgttttacgtggcggtttttgggtagttggcgagaatagttggtacgggttttcgtgggtggtgggtcgtagttgttgtatggggatattatttatagtggggtcgatcgttatcgtttgtatatagttgttggtggtatcgtgtatttggagatcggtttgttgtttcgtaatttcgatcgttacggcgtggagtgttgagggattttgtttttaacgttattattatttatatttcggatatttagtgatgggggaggatggtatagtggttaagagtatagattttagagattgttagagttgattttagttaaggtatggtatcgtttttgttttttttaggatttcggggtttttttgggtttagtttttttatttgtaaattggggatagtaaatgtatggggtcgtagggtgttgagtgataggaggttgtttagttatatgggaggtgtttagtaaaggagagtaatttttataggtgtttgttttttgatttttttattttttaggtgttttgttgttttttttttttattgatatttttcggaggtttttatgttgatagatttttttttttttattttgttttttagtttgatttttttttcgttttgggttttttttttttggtcggtttttttgtgttttatttttcggattaagtttttttcgtttggttttttttttttggtgatttatatcgttcgtaaagttatagcgtatttggattattcgttttggtggcgtttggtcgttaggaggtagtattttgtttgcggggcggagtcggggagttcgtttttttttttttagggttgaagggatttttttcggagttcgtttacgcgagatgaggacggtggtttagtttttttatgttttttttttgggggtcgttttcgttttcgtttcgtgcgttttttgggtggggtcgggggcggttttaaaattttttgtcgatttagtcggttttcgtcgtcgtcgtttttcgcgttttgggttattttttttttattttttttcgcggagtagttagatagcgagggtttcggtcgggggtaggggggacgtttcgttcggggtattttttcggttttgagtcgttcgcggggtcggtttcggttcggagcggaggaaggagtcgtcgaggagtagtttgaggttttagagtttgagacgagtcgtcgtcgttttcgttattgcggggaggagggggaggaggagcgggaggagggacgagttggtcgggagaagaggaaaaaaatttttgagattttttcgttgtcgttgggagtcggaggcgcggggattttttggcgcgacgttgtttcgcgaggaggtaggatttggggattttagatcgtttttttttgtcgtcggggacgtttgttttttttttgttttttatacggcgttttttaggcgtttttatttcggattagttttcgggagtcgtcgattcggtttttcgtaaagatttttttttagatttcgggcgtattttttgtacgtcgtttttattttcggtttgttttttgagttttcgcgtattttagatttttttttttttaggagacggattttttttcgatttgttatagattttttatttaagattatttattttttggtattagatcgcgtttatttaggttattttcgtgggatattgagatattttcggtttaagttttttttttattattgcgtttttttttttgaggagttttagttttttttcgaggtttttttattttttgtcgggagatttttagtttttgtaggggcggggtttttttattatattagttttgttcgcgttttcggtagtgtcggggggcgtcgttttttttatg

SEQ ID NO: 78 - DNA, 2205 bp, Artificial Sequence
  chemically treated genomic DNA (Homo sapiens)
tatgggggaggcggcgtttttcggtattgtcgagagcgcgaatagggttggtgtggtggggaggtttcgtttttgtaggggttgggggtttttcggtaaaaggtaggagggtttcgagggaaagttgaggttttttagggagaagggcgtagtggtggaggggaggtttggatcgggggtgttttagtattttacggaaataatttagatgggcgcgatttggtattagaaggtgggtggttttgaataggggatttgtggtaggtcggagagagattcgttttttggaggagaaagggtttaggatgcgcgggggtttaggagataggtcggggatgaaggcggcgtgtagggggtgcgttcgaggtttggggaaaagtttttgcgggaggtcgggtcggcgattttcgagggttggttcggaatgggggcgtttgagggacgtcgtgtagggggtagggagggagtaagcgttttcggcggtaaagggaggcggtttggggtttttaagttttgttttttcgcggggtagcgtcgcgttaagaggttttcgcgttttcggtttttagcggtaacggaaaagttttaaaagtttttttttttttttttcgattagttcgttttttttttcgttttttttttttttttttttcgtagtggcgggggcggcggcggttcgttttagattttggggttttaggttgtttttcggcgattttttttttcgtttcgggtcgaggtcggtttcgcgggcggtttagagtcgggggggtgtttcggacggggcgttttttttgttttcggtcggggttttcgttgtttggttgtttcgcggagggaggtgggagggagatggtttagggcgcgaagggcggcggcggcggggatcggttgggtcggtagggggttttgaagtcgttttcggttttatttaggaagcgtacggggcgggagcgggggcggtttttagggggagggtatgggggggttgggttatcgtttttatttcgcgtgggcgggtttcgaggggggtttttttagttttgggggaaagggggcgggtttttcggtttcgtttcgtaaatagggtgttgttttttggcggttaagcgttattaaagcgggtgatttagatgcgttgtggttttgcgggcggtgtgggttattagagaaagaggattaggcggagaaggtttaattcgggggatgagatataggggagtcgattagaggagggggatttagaacggaaggagagttaggttgggaaataaggtaggagaaggagggtttgttaatatgggggttttcggagggtgttagtgggaggagggggtaataggatatttgagggatggaagggttaggaggtagatatttgtaagaattgtttttttttattgagtattttttatgtggttaagtagttttttgttatttaatattttgcgattttatatatttattgtttttaatttatagatagggaaattgggtttagagggatttcgaggttttagaaaggatagaagcggtgttatgttttagttggggttagttttgatagtttttagagtttgtgtttttgattattgtgttatttttttttattattgggtgttcggggtgtggatggtggtgacgttggaggtagagttttttagtattttacgtcgtagcggtcgaagttgcggagtagtaggtcgatttttaggtgtacggtgttattagtagttgtgtgtaggcgatagcggtcggttttattgtagatggtgtttttatgtagtagttgcggtttattatttacgaaagttcgtgttaattgttttcgttaattgtttaggggtcgttacgtggggtaggttagttggtgggtgttcgggttattgggtatatggtaaaatttatagtttgtaagttggtagcggttaaagttgttttgggattatatttggaaatggagtcggggttagtttgtaggaaaggagagagaggggaaaggagggatgggtggggattagatttttgttgattttttattttttgatatttattggagattttaggtttagtttttttttttttgggtttttgttttagagtttttaatttagttttttttttaggtttttatcgttttatttatttttatatagtagttaaagtgatttttttaaatttatgttatttttttgttaaggattt

SEQ ID NO: 79 - DNA, 3037 bp, Artificial Sequence
  chemically treated genomic DNA (Homo sapiens)
gaattttcgaaattttttttgtagaaaattttggaaggtgtttgttatattgattttggaatgtgtgtttatttggggttatataaatttgttttgtggaagttatttgaagttaggaagagatggagggtattttttaggagtgagatgagattttattatatttgattgtttagtattatttttgagtgaggggattaaaaaatttattttttaaattaggatatttttaagagtggaagggggatttattaatatttttatttggataagaggtaaatattagaatgttttcgatgaaggggatatataatggatttttttgatgtgaaatttgttagatgggttggaaagttcgtatattgggataagtatgatttgagttgtttgggataaggataggggtataagagaaggaaatgggtaaagagagaagtttgtatttagttaagggtgtagagatgttatatatgattgttttttagggaatcgggtttttagtttatattttagttgtttaattattttttttttgaattgattgttttttttttggaattttaggtttgattttattttttggtttttttagtttacgatttttttgattcgatttttttttttagaatttagtcgtttgaatttttagtttgtggtttttttttaggttttagttttttttgtttttgattgaaatagtagtattttttaagttttgggggttttttcgggttttagtttcgatttagaattcgttcgttgtttgttacgttgttattgtcgttttttttataaagggatttgagcgttcgggtttaggggtttcgtatagtaggtgaggtttttttgttttatttttttgggttgttcgtgtttcgtgttttggattatcgtttagtagtgttttgttttttgtttgggtttcggttttttttgtatttgttgtttggattttcggtttgtttgggtttgggttttggtgggtttggttttggtttttttttttgtttttgattttttatttgttagttttattgtttttgttatatattttttgtttttgttatggtttttttttgttttttttttgtttttttttgtttttttttgtttattttggggtttttttgattgtattttgtttttttttttgtcgatttttttttcgggggtcggggggtgttgttttttagggcgggaggtttgtttttcgtcgcgtgtttcgtttcgtttattgtttttttttttttttttttttttttgtaggttttttttatgatattatttgaacgttttttttttttaagggtgtgtggtattattttatattttttttttttggggttgttgttggttttgttgtttggggtttaggtgaggtagtaggagaatgggggttgttggggtggtttagttaaattttgagttttagagttttttttaattttgtttttttttaggggttttttggtgttggttttatatttttagttgtttagattgttcgttagtattttaagatgtattttgtttatagtaattttaaatttgttgtttattttattggtaaatatttatttgattttttagatatgtttttattagttttttttttatttttgttttaggaatttaagtatttattttttttttttaattttttttacgttaaaaaaaatagagggagtttatttttatgtttttttttgttattttttaggaatttagttgtttagtgtttatttttttagggattgagatttttgatttagatttttgattttttatttttattttttatggttttttttaggagattttagtaagtagaatttattgttttggagagtaaatacggatcgtgtttttttttaggatggtttttttttgagtaataatttttttttggtttttattagtggtatttatttcgtttatttttaggtggttttttttgggaaagtttatttttttaaggttattttttttttattttatttggtttatgaggtttagtttttttttttttagtattttttttatgtgtttttttttagtttttagaagatggtgtatttagggttgtaggaattttggttgtattcgatgtattacggggttgcgttttagtttatttagggagattagttatttatttatatagatggtattttttatttagtttttagttttagtattgttttttttggagttttcgttttgtagaatttggaaaaatttagaaagaaaaaataattgattttaagattttttttttattttgtttttattttgattattttaggggtcgttattattttttttttggttattttaatagtttaagttttttttgattaagttatcggagtttttaaagaaggaattttaggtattttaggggattatatttttttgaattatttttgatgtttgtttggttgaggattttaagtttgtttaggaatttttagtttaaagttgttggttttgtttattagttaggtggggtttagatttatatatagaggaagagtaggtatatggaggagtttgggggatgattagaggtagggaggggattatttatgaaggtaaaaaaattaaattatttatttatggaggatggagagaggggaataatagaagaatatttaaggagaaatagagataggtttaagagatgaagagtgagagggtatgcgtataaggttgattaagagagaaagaagtaggtatgagggattatagggttttagaaggtagggaaaggttttgaaagttagttgtcgattagagttttatacggaggtatttgtattttcgatgaagtttaataaattttttttttttgaaatgttgtttgtttgtgtgtgtgtgtttgggagtgagaattttttagtttatttaaggaatggagggagggatagagggtttaaagggagtaagagttgtggggagaataaaaggataagggtttagagagttttagggatatgtgatggatttattaggtgaggtcgttagattgttgtag

SEQ ID NO: 80 - DNA, 3037 bp, Artificial Sequence
  chemically treated genomic DNA (Homo sapiens)
ttgtagtagtttggcggttttatttggtgagtttattatatatttttgaagttttttgagtttttatttttttgttttttttatagtttttgttttttttgagttttttgtttttttttttattttttagatagattgggaagtttttatttttagatatatatatataagtagatagtattttagagaaaagaggtttattgggttttatcgagggtgtagatgttttcgtgtggggttttggtcggtagttggtttttagagtttttttttgttttttggggttttgtgattttttatgtttattttttttttttttggttagttttgtgcgtatgtttttttattttttattttttgggtttgtttttgtttttttttggatgtttttttattatttttttttttttattttttataaataaataatttaatttttttgtttttataaatagttttttttttgtttttagttattttttaagtttttttatgtgtttgttttttttttgtgtgtggatttaggttttatttagttggtggataagattaatagttttgggttgggaatttttaggtaggtttgaaatttttagttagatagatattagggatggtttagggaggtgtggttttttgggatgtttagaattttttttttgaaagtttcggtgatttgattagggaagatttgagttgttggaatggttaaaggagaggtggtgacgatttttgaaatggttagaatggaggtagaatggggagaaggttttgaaattaattattttttttttttggatttttttaagttttatagagcgaaggttttaaagaagatagtattagggttgaggattaggtgggggatgttatttgtgtgggtggatagttggtttttttgggtgagttggaacgtagtttcgtggtatatcgagtgtagttagggtttttgtagttttggatatattattttttgggagttgaggagaggtatatggaaggggtattgggaggagaagagttggattttatgggttaggtagagtggggaggaggtggttttgggagagtaggtttttttagagaagattatttgggagtagacgaagtagatgttattggtggggattaggagagaattgttgtttaaggagaaattattttggaggaaggtacggttcgtgtttgttttttagagtagtgagttttgtttgttggggttttttaggaagagttataggggatgggggtgggagattaggggtttggattagaggttttaatttttgaggaagtgggtattgaataattgagtttttgggggatggtagggggaggtataggagtgggttttttttgttttttttagcgtgggggaagttgggggagaggggtggatgtttgggtttttgaggtaggggtaggaggagagttggtggggatatgtttgggaggttaggtggatgtttattaatgaggtgagtagtaggtttgaggttgttgtgggtaagatgtattttggggtgttgacgggtagtttgggtagttgaaggtgtgaggttaatattagggagtttttaggggagaatagagttgaggggggttttagggtttaaggtttggttgagttattttagtagtttttatttttttgttgttttatttgggttttaggtagtagaattagtagtagttttagaaggaggaggtgtagggtggtgttatatatttttgggaggaagagacgtttaggtggtgttatggggagaatttgtagagaaagagagagagagagagagatagtgagcggggcggggtacgcggcggaagatagatttttcgttttgggagatagtatttttcgattttcgagagagagatcgatagagaaggggataagatgtagttagagaaattttaaggtgagtagagggagatagagagagataggaagggaatagagaggaattatggtagaaatagagaatgtgtgatagagataatgagattgatagatggagagttagagatagagaaggaaattaaaattaaatttattaaggtttaggtttaggtaggtcggggatttaggtagtaggtgtaggagggatcgaggtttaggtagagggtaggatattgttgggcggtagtttaaagtacgaagtacgggtagtttaaggagatggggtaggagagttttatttgttgtgcggagtttttgggttcggacgtttaggtttttttatagaggaagcggtagtggtagcgtggtaggtagcgggcgggttttaggtcggggttggggttcggggaagtttttagggtttagaagatattgttgttttagttaaaggtaggaaaggttgaggtttaggagagaattataggttgggggtttaggcgattgagttttgggaaagggagtcgggttaggggaatcgtgggttgggagggttagggagtggggttaggtttagagttttaaagaagggatagttaatttagagaggaggtggttgagtagttggggtgtgagttggaggttcggttttttgaagagtaattatatataatatttttgtatttttggttgagtataggtttttttttttgtttattttttttttttgtatttttgtttttgttttaaataatttaaattatatttgttttagtatacggattttttagtttatttggtaggttttatattaagaaggtttattatatattttttttatcggggatattttggtgtttgttttttgtttaggtgaaaatattaatggattttttttttatttttgaaagtgttttagtttggaagataaattttttggtttttttatttagagatgatgttggatagttaagtatgatgaggttttattttatttttgaaggatgttttttatttttttttgattttaggtggtttttatagaatagatttatataattttaaataaatatatattttaggattaatgtggtagatattttttaaagttttttataaaggaagtttcgagaattt

SEQ ID NO: 81 - DNA, 3107 bp, Artificial Sequence
  chemically treated genomic DNA (Homo sapiens)
ttgtagtgaacggtgattatattattgtatattagtttggggatatagttagattttgttataaaaaagtaaaaataattggttagtgtatgaggggttcgtgttttttgtttgtttgtttgttgagatagagttttattttgtcgttagattggaatgtagtggtatattttcggtttattgtaatttttgttttttaggtttaagtaattatttgttttagttttttaagtagttgggattataggcgttcgtattacgttcggttaatttttttgtatttttagtagagacggggttttattattttggttaggttggttttgaatttttgattttatgatttattcgtttcggttttttaaagtgttgggattataggcgtgagtttttcgttcggttaggggcgcgcgtttttaaaatatgggagagggaattgtgttttataattattattaggtgtttcgatatcgggtgttacgtcgtttcgtttttgaggcgcggcggtttattttggtaggtcgaggcgggtggattatttgaggttaggagttcgagattagtttgataaatatggtgaaatttcgtttttattaaaaatataaaaaattagtcggacgtggtggcgtatgtttgtaattttagttatttgggaggttgaggtaggagaatcgtttgaattcgggaggcggaggttgcgatgagtcgagatcgcgttattgtattttagtttgggaaataagagcgaaattcgttttaagaaaaaaaaggaaagattttttttttttttttcgtcggaaatatttttttttaggacggcgcgtttgtgcggcgacgcgcgtttagttatttagtaatttcggcgttaagttattttaggtggagtttagtaataatagagttatcgcgttttttattaattagcgtcgatttcgttttcgtaggtttaattaattagtgtcggcgttgtaaggaagtttttagagttttcgaggaaggtttttttaatttaaatttattcgtttgataatttttttatatttttttaaagaaggaagagaagcgtatagaggagaagggaaataattttttaggagttttttttacggttatgaggaatttggggtttagttgaaaagtttaaattgtttttcgggaggttgggcgcggcgaattatttttagcggcgtacggagacggcgtttacgtgaggggtgataagtgacgtaatattcgttgtataaatttgttttcgttagttcggagtatttaggggcggttggttttgttgggtgagtttgtttgtgtttttgtgggtggacgtggttggtgattggtaggattttggtattcgttaataggtattggttcgtagtcgtaacgattttgggggggtgtgagaggggggaatgggtgaggttaaggtggaggttttttggggttgggtgggtcgttgaggggagggcgtgggggaggggagggcgaggtgacgcggcgttgggttttttcgggatagtgggttttgttgatttgaggggggcgagggcggttggcgcgcgcgggttgacggaaattaacggacgtttaatcgatcggcgattttgtcgagtttatttcgcggggaaggcggaaaagaggtagtttgtgtggtttttggaagtttttattttggaattttagtgtgagaaaggtgtttttttttgtgttttaatgggatttttatttcgcgagttttgtgggtttggttttgtttttagtttgtttaatatcgtgtttaggtttgaggtagattggagttcggtcgggggagtttgaatattcggaatagttagtggggaaagttgtggacgtttggtaagagagcgttttggatttttcgttgttgacgttgaaattttgaatgacgaatttcgtattaagtgatttagttttgtaaaattgaggggaggtttgcggaatattaacgtatttaaggtattttgaaggaatagttgttaattttgaagaatattaggtgtaaaagtaagaaatataatgattttgaggtgatacgtttatgttttatttttaaattaggttaaaatgtagattttcgtgaaaatttttatcggtaagattattatttttgaggtggagtttagtgatattatcgaaaatgtgaaggttaagatttaggataaggaaggtatttttttcgattagtagaggtttatttttgtaggtaagtagttggaagatggtcgtattttttttgattataatatttagaaggagtcgattttgtatttggttttgcgtttgagaggtggtatgtagattttcgtgaagattttgatcggtaagattattattttggaagtggagtttagtgatattatcgaaaatgtgaaggttaagatttaggataaagaaggtatttttttcgattagtagaggtttatttttgtaggtaagtagttggaagatggtcgtattttttttgattataatatttagaaggagtcgattttgtatttggttttgcgtttgagaggtggtatgtagattttcgtgaagattttgatcggtaagattattattttggaagtggagtttagtgatattatcgaaaatgtgaaggttaagatttaagataaagaaggtatttttttcgattagtagaggtttatttttgtaggtaagtagttggaagatggtcgtattttttttgattataatatttagaaggagtcgattttgtatttggttttgcgtttgaggggtggttgttaattttttagttatggtattcgtagtgtttagtgatggtattattttgtattatagttatttgttttaatttaagtttagaaattataagttttagtaatagttgaatttgtttaaaatgttaataaaggtttcgttgtatggtagtatatttggtgttttgttatgaaattttttagtgatgtgtgggtacgtttaaaattggtgaaaatgtttagggatttaattttgagattggtaatgtgtttaaagttaagttatttgattttggtatatatttgggtgggttgaggggtaagagttttttttgttgtttaagttattataagttaggattt

SEQ ID NO: 82 - DNA, 3107 bp, Artificial Sequence
  chemically treated genomic DNA (Homo sapiens)
ggattttaatttgtaatgatttaaatagtaaagaaggtttttgttttttagtttatttaagtgtatattaaagttaagtgatttaattttgagtatattattaattttaaaattaaatttttaaatatttttattagttttaagcgtatttatatattattagagaattttatgataaaatattaagtatgttattatgtaacgaaatttttattaatattttgaataggtttagttattattgaaatttgtaatttttaaatttaagttggggtaaatggttatagtgtagagtaatgttattattgggtattgcgaatgttatgattgaagaattaatagttattttttaggcgtaggattaggtgtagggtcgattttttttggatgttgtagttagaaagagtgcggttattttttagttgtttgtttgtaaagatgagtttttgttggtcgggagggatgttttttttattttggattttggtttttatattttcgatggtgttattgggttttatttttagagtgatggttttgtcggttagggtttttacgaagatttgtatattattttttagacgtaggattaggtgtagggtcgattttttttggatgttgtagttagaaagagtgcggttattttttagttgtttgtttgtaaagatgagtttttgttggtcgggagggatgttttttttattttggattttggtttttatattttcgatggtgttattgggttttatttttagggtgatggttttgtcggttagggtttttacgaagatttgtatattattttttagacgtaggattaggtgtagggtcgattttttttggatgttgtagttagaaagagtacggttattttttagttgtttgtttgtaaagatgagtttttgttggtcggggggaatgttttttttattttggattttggtttttatattttcgatggtgttattgggttttattttaagggtgatggttttgtcggtaagggtttttacgaagatttgtattttgatttagtttaaaagtaaaatataagcgtgttattttaggattattgtattttttgtttttatatttaatattttttaaaattagtaattatttttttaaaatgttttaaatacgttaatatttcgtaagtttttttttaattttataaggttaagttatttaatacgaaattcgttatttaaggttttaacgttaatagcggaaaatttagagcgtttttttattaagcgtttatagttttttttattaattgtttcggatatttaaattttttcgatcgaattttaatttgttttaaatttaagtacggtgttaggtaaattgaaaataaaattaaatttataagattcgcgaaataaaaattttattgaaatataagaaggggtattttttttatattgggattttaaagtaaaggtttttagaaattatataaattatttttttttcgtttttttcgcgaagtaaattcgatagaatcgtcgatcggttaggcgttcgttagttttcgttaattcgcgcgcgttaatcgttttcgttttttttaggttaataaggtttattgtttcggaaaggtttagcgtcgcgttatttcgttttttttttttttacgttttttttttagcggtttatttaattttaagaagtttttattttgattttatttattttttttttttatatttttttaaggtcgttacggttgcgggttagtatttgttagcggatattaggattttgttaattattaattacgtttatttatagggatataaataagtttatttaataaagttaatcgtttttaaatgtttcgggttggcggaggtaaatttatgtaacgagtgttgcgttatttattattttttacgtagacgtcgttttcgtgcgtcgttgaaagtagttcgtcgcgtttaatttttcgagaggtagtttaggttttttaattgagttttaaattttttatagtcgtaagaaaggtttttaaaaaattatttttttttttttttatgcgttttttttttttttttaggaaaatataagaaaattattaggcggatgaatttgagttgaagaaatttttttcgaaagttttggaaatttttttgtagcgtcggtattgattggttaggtttgcgaaggcgaggtcggcgttgattggtgggggacgcggtggttttgttgttgttgggttttatttggggtggtttagcgtcgaggttgttaagtaattgagcgcgcgtcgtcgtataggcgcgtcgttttgaaagagggtattttcggcgggagaaggagggggggttttttttttttttttttgagacggatttcgtttttgttttttaggttggagtgtaatggcgcgatttcggtttatcgtaattttcgtttttcgggtttaagcgatttttttgttttagttttttaagtagttgggattataggtatgcgttattacgttcggttaattttttgtatttttagtagagacggggttttattatgtttgttaggttggtttcgaatttttgattttaggtaatttattcgtttcggtttgttaaagtgggtcgtcgcgttttagaagcgggacggcgtggtattcgatatcgagatatttgatggtgattgtgaagtataatttttttttttatgttttaaaaacgcgcgtttttggtcgggcgggaggtttacgtttgtaattttagtattttgggaggtcgaggcgggtggattatgaggttaggggtttaagattagtttggttaaggtggtgaaatttcgtttttattaaaaatataaaaaaattagtcgggcgtggtgcgggcgtttgtaattttagttatttgggaggttgaggtagataattgtttgaatttaggaggtagagattgtagtgggtcgagaatgtgttattgtattttagtttggcgatagagtgagattttgttttaataaatagataaataaaaaatacgagttttttatatattggttagttgtttttgtttttttgtgataaagtttggttgtgtttttaggttggtgtgtagtggtgtgattatcgtttattgtag

SEQ ID NO: 83 - DNA, 5969 bp, Artificial Sequence
  chemically treated genomic DNA (Homo sapiens)
ttaaggaggaaggatttataattgatttcgttgttttttattagtgttaaaatagattagtttagtgatgtttaagtggatacgatttagaagcgagacgtaaagaggttaaatacgggtaaatcgtacgtaaaattttgatattattgtaatacgttcgtggggtgggggtggtaagagtgttttagtatcgtagtttcggcgtagatcggaatttcgtagttattttggtggtttcgtggtgggaaagacgcgttttagcgaatcggtcgcgttattttcggagtacgttgggaattacggtaggttagggcgtaaagagagtagtcgggcggttttttggtgttatttgttggtttttcgtgtgtggtaagtattgtcgttttttcgttgattatttgttgggttattgtcgagaattacggttggggtgagaattgtggtttggcgttattttttagtgagggttattttggtgttcggaaagggcgttgggttattagtatattgttacgagtgggagtaggagttttgtagtcggatatcgtggattttgtttttgtttttttcgttttggttgtgtggttttttataggttatttaatttttttggggttaagttgttttatttgtgaagtggggattatagtatttatgttatgagagcgtttgaggagatgataggatgtatgagaaatgttttgttttttaaataaatgttggttttattattgttcgtttttttttgtttttttgttttttgatgttgtttttgtttgttttgtttttttgagataggattttattttgttgtttaagttggaatgtaatggtatgattatagtttattgtagttttgaatttttgggttagagcgattttttcgttttagtttttggagtagttgggattataggtatattttattttattttaaataatttttttattatttttagtagagatagggttttgttatgttgtttaggttggttttaagtttttgggtttaagtgatttttttatttgggttttttaaattgttgggattataggcgtgagttattacgatcggtttttaatttttatttattttgtttttttttaatggaacgaaagttttatgagattagaggttttgttttgatagattttaataaatgtataatattgtatgattattattataattaagatttaagatagtttcgtttttttataaaattgttttagttttttaattaatttcgtttattatttagtattagtaattattgatttgttttttttttttatagttttgttttttttagaattttatatatagggaattgtcgtggtttgaatatttgtttttttaaaattcgcgttgaaatttaatttttagtgtggtagtattgagaggtggggttttgaagaggcgattgggatatgagagttttgttataatgtttttataaatgaattaatagattaatgggtttaggggttaatgggttaatgggttatcgtgggagtgggattggtgtttttataaaaggaagaagagagatttgagttagtatattgaggtttttcgcgatgtgatgttttatacggttttaggatttaatagagtttttattagtaagagggtttttattagatgtagttttttaatttcggattttttagtttttatgagaaatgtttttgtgggattttttttatttaagtatattgtttttaagatttatttatgcgtttttttattttttcgtttttttttgtgagataaggtttggttttattgtttaagttggagtgtagttgtatgatttcggtttattgtaatttttattttttaggttttatttttattttagttttttaagtagttgggattataggtatgtattattatattcggttaatttttgtattttttgtagagatgggtttttgttatgttgtttaggttggtttttatagtttttagttggtgagttgaagaaattcgtttgttttggttttttaaagtgttggaattgtagttatgagtcgttgtgtttagtcgtatatgtatatttgtattatttatttgtttttttttattattggtatagaagggatgttttataggagtaggttttatatagggttgtttttttgattttaggttattatgagtaaaattattataaatatttatatataagttttgtgaatatagttttttattttttttgggtaaataatgtttaggtgtgggagtgttgggttatagtggttttaagggtaaatgatttttagttttgagttttttttttttagattttagttttttgttttaggtattgggatatattagtaataagaagtagtaagtttttttttttatttaggttatatttcggggatggagatagaaatatataaggaaagaataaataatatgttgtttttaaagaaattgtgtaaaaagaaaaaataaataagatgtttttgtatagtatagtagttatagagtaatgggttagaaagtggggtaggaggagaagttttttttagggaaagattttgagttgagatttgaggttttttaggtaaggggacggtgaatgtaagggtgtgtaggttatagggggataagttgggtgtgtttagtaattgtgttgggagttggatttagtagtgggggtttttattagagaggaggtagtattgagatttgggtaggaagttggggtttattttaagtttttttgaaaattaaagaagggttttaatttaaggattgtttttttttttttttttttttttttgtttgtagatagggttttgttttgttatttaggttggagtgtagtggtataattttagtttattgtaattttcgtttttcgggtttaagtgatttttttgttttagttttttgagtagttgggattgtaaatgtatgttattacgtttggttaatttttgtatttttagtagagacggggttttattatgtttgttaggttggtttcgaatttttgtgtttaagcgatacgtttttttttggttttttaaagtgttgggattataggcgtgagttatcgagttgggttaggttttaggtattgttatgatgtaaaaatttttttttagaaaagagaatattagttttttagttggttttttgtagttaggagatgtaagagtagtagttgaatttgaggtttgttttggagaaagaattaaaagtagatatggatggtttggatgtgagggagggaaagagaattttaagtgtattagtagtggtgggaggaggttcggtatagtggtgttatttggaagataaatcgttggtgtttaatttttatgattcgaaagttttttataagtttgatatattaggtaaaatgtttgattgtattaagttttagtttatcgttataaaataggttatgaaaattgcgtgagaaaatgtatataatagtttaataaataatattggttgggtgtggtggtttatgtttgtaattttagtattttgggaggttaaggtgggtagatcgtttgaggttaggagttcgagattagattggttaatatggtgagattttttatttttattaaaaaaatataaaatatatttgggtaaatatggtgaaattttatttttattaaaaatagaaaaattagttaggcgtggtggcgcgcgtttataattttagttgaggtacgagaatcgtttgaattcgggaggcggaggttgtagtgggttgagattatattattgtattttagtttgggcgatagagtaagattttgttttaaaaataaaatatatatataaaatataatagtatttgtttgtttgtttgtttttgagatgtttcggattatagtgcggggattatagacgtgagttattaagttcggataatattattatattgtttattgtatttttataatatttttaaggggtaggaatttttttttttagtttttttttttcgattttatcgagagatagggtttcgttttgtcgtttaggtttggagtgtattggcgcgattaaagtttattatagtttagattttttggttttaagcgattttttagtttgggttttttaaagcgttaggattataggcgtgggttatcgcgtttgattagttttttttttttgtagttgagttttaagagtttgtttaaagagtagaggtgggttgaaggtataaagcgaatgaaagaataggttttcgggtatcgttgtacgttttatttttttttaggggcgttgtattttagtttttttcgtatatgcgtattgggttttttatcgtttttcgtttttagtaaagtttttcgttcggagtatgcgcgggtcgtttggcgttaattgttgatcgttatagttatagttagggttagtttcgtcggttttcgggtggcgcgcgttcgttgtttttttagttttaggatgatcggttagaagacgttttattttttttttttttttagtttcgttaggaagcgatacgtttttagtttcgagtcggtcgtttaggggatcggcgtggttggggtgtttgaggaaagcggagatgcggcggtgaggcgcggtttgggtcggggttagggggtgaagggggaggaaggcggtgggtttcgtttgacggagggcgtgtaggatcgcgtttttgattcggtaaattcgggtttcgttttttaaatagtttttacgtgtttaaaatagtcgtcgttgttttttatgggtcgttatgttaaagggttagttaatgggaacgcgtttcggggtttatggcgttaattcgcgcgtcgtaggtttttttggttcggtgcgttgtttaattagaggggagagggggcgggatttagagggaggttttttgtcgcgaaaagattacgtggggacgcggtggggcgggtttggcgggggcggggtatttttgtgtagggtttttagttatcgcgacgtttttcgggaagttatagggcgttttttagttcgttttttcgttttagtttagaatttaatttttaattttcggatcgggtttagttttgggtttttattgttcgtttttgttgggatttgttttataaatgggcgttttttgttttgggtcgtgggggttgggtcggaagttgcggacgtttgggaaggggtcgttgtagtttttgagtcgtttttgcggggattatttgtaggttattttagttaagaaggtttcggttgggtaggaggagtttgggacgtcgtttttttcgtcgttgagtgtcgagtagttggatcggatttagaggaataaggtcgcggttttgtttagattcgcggttcgtaacgtgttcgtgggttttggagagagttggaagaagtattttagcggggagttcgggaaatcgtattttattaaggtaaatatggaaatgtattttttataagggtaaatgtggaggttgtcggtttttttgttttgttagtgtagtcggttaagtttatgttttcgtaggtttaggttgtattttttttaattttttttatttataaagggggtaaaagaaagttatgatgttttattttgtagttttatattggttaaagttgttaacgattcgcgagatgatattatggatttatttaagttatatagtttattgtttaggaaaggttggcgtagtaaaattattaattattttgaatgaaatttggtttgagttttaaaaagtcgagaggagtggtattgttaggatttagtttagagaaagaggtaaggaattgatttgattgaattatttaggtgggggggtaggtattgtttttgtttgttgttttttaaaagaatttggatataatatgataaagaattaatgatgttttaaataatttgtattagaagtttttttattgaatttttatggtttttaatgagaatttgattttaagtttagtttatttttaaattagt

SEQ ID NO: 84 - DNA, 5969 bp, Artificial Sequence
  chemically treated genomic DNA (Homo sapiens)
gttgatttaaagataaattagatttaaaattagatttttattggaaattataagaatttaataagaaagtttttagtgtaagttatttggaatattattagttttttgttatgttatgtttaaatttttttaaaaaataataaataaaaatagtgtttgtttttttatttaagtggtttaattaggttaattttttgtttttttttttgggttgggttttgatagtgttatttttttcggttttttaaagtttaagttaggttttatttaggatggttggtgattttattacgttagttttttttggataatagattatgtgatttaaatgaatttatgatattatttcgcgggtcgttaataattttaattaatataaagttgtagagtgaaatattatggtttttttttattttttttgtgagtaaaggaggttgaagggggtataatttaagtttacggaaatatgaatttggtcggttatattaataagataaaagggtcggtagtttttatatttatttttatggaaggtgtatttttatatttattttgataaaatacggtttttcgaatttttcgttgaggtgttttttttagttttttttaaagtttacgggtacgttgcgggtcgcgagtttgagtagggtcgcggttttgtttttttggattcggtttaattgttcggtatttagcggcgaggagggcggcgttttaggttttttttgtttagtcggggtttttttggttgggatggtttgtaagtggttttcgtagaggcggtttaagagttgtagcggtttttttttaggcgttcgtagttttcggtttaatttttacggtttaaggtagaagacgtttatttgtggaataggttttagtaaaagcggatagtaagagtttagggttgggttcggttcgggaattgggaattaggttttaaattggagcggggagacgggttgggaggcgttttatggtttttcgaggagcgtcgcggtgattgggaattttgtatagaggtgtttcgttttcgttagattcgttttatcgcgtttttacgtggttttttcgcggtaaaaaatttttttttgggtttcgtttttttttttttttgattggatagcgtatcgagttaggagggtttgcggcgcgcggattggcgttatgggtttcgagacgcgtttttattggttggttttttagtatggcggtttatgggggatagcggcggttattttgaatacgtggaggttatttggaaagcggagttcgggtttatcgagttagaggcgcgattttgtacgtttttcgttaggcggggtttatcgtttttttttttttttattttttagtttcggtttaagtcgcgttttatcgtcgtattttcgttttttttaggtattttagttacgtcggttttttggacggtcggttcggggttgggggcgtgtcgttttttggcggggttgggggagaaaaaggagtagagcgttttttggtcgattattttggagttgaggaggtagcgaacgcgcgttattcgggaatcggcgaggttagttttggttgtggttgtggcggttagtaattggcgttaagcggttcgcgtatgtttcgagcggggggttttgttgggggcggggggcggtggaaggtttagtgcgtatgtgcgggaggggttggagtgtaacgtttttgggaggaggtggggcgtgtaacggtgttcgggggtttatttttttattcgttttgtgtttttagtttatttttgttttttggataggtttttaaggtttagttgtaagaagagaagattggttaggcgcggtggtttacgtttgtaattttagcgttttgggaggtttaggttggaggatcgtttgaggttagagggtttgagttgtagtgagttttgatcgcgttaatgtattttaggtttgggcgatagagcgagattttgtttttcggtggggtcggggggagggggttgggaagaaaagtttttgttttttaggggtgttgtgggagtgtaatgaataatataataatattgttcgggtttgatggtttacgtttgtaattttcgtattgtaattcgaggtattttaaaaataaataaataaataaatattattatattttgtgtgtgtattttgtttttgagatagagttttgttttgtcgtttaggttggaatgtagtggtgtgattttagtttattgtaattttcgtttttcggatttaagcgattttcgtgttttagttaggattataggcgcgcgttattacgtttggttaatttttttatttttagtagaaatggggttttattatgtttgtttaagtgtgttttgtatttttttagtagagatgggggattttattatgttggttagtttggtttcgaatttttgattttaggcgatttgtttattttggttttttaaagtgttgggattataggtatgagttattatatttagttaatattatttgttgaattgttatatatatttttttacgtaatttttatggtttattttatgacgataaattaaggtttagtgtagttaaatattttgtttaatgtattaggtttgtgggagattttcgggttatagaggttaaatattaacgatttgttttttaaatgatattattgtatcgaatttttttttattattattaatatatttaggatttttttttttttttttatatttaaattatttatatttgtttttggttttttttttaaagtaaattttaaatttaattgttgtttttgtattttttagttatagaagattagttgggaagttggtgtttttttttttagagagagatttttatattatgataatatttggggtttggtttagttcggtggtttacgtttgtaattttaatattttgggaggttaaggaggggcgtatcgtttgagtataggagttcgagattagtttggtaaatatggtgaaatttcgtttttattaaaaatataaaaattagttaggcgtggtggtatgtatttgtaattttagttatttaggaggttgaggtaggagaattatttgaattcgggaggcggaggttgtagtgagttgagattgtgttattgtattttagtttgggtgatagagtaagattttgtttataaataaaaaaaagaaaaagaaaaaaaagataatttttaggttaaaatttttttttggtttttaaaaaggtttagaataaattttagttttttatttaggttttagtgttgttttttttttgatggaagtttttattattgagtttagtttttagtataattgttggatatatttagtttgtttttttgtggtttgtatatttttgtatttatcgtttttttgtttggaaagttttaggttttagtttaggatttttttttgaaaaggatttttttttttgttttattttttagtttattgttttataattgttatattatataaaagtattttatttattttttttttttatataatttttttagagatagtatattatttattttttttttgtgtgtttttgtttttattttcgaaatgtaatttgagtgaagaaaggaatttgttgttttttgttgttggtgtgttttagtgtttaggataagaagttgaagtttaagggagagaggtttaaagttgaaaattatttgtttttagagttattatgatttagtatttttatatttaggtattatttatttaagggaaatgaaaaattatatttataaagtttgtatgtgaatgtttatagtgattttatttatagtaatttaaaattagagaaataattttatgtggggtttatttttgtggggtattttttttatattagtaataaaaaggaataaataagtaatataaatgtgtatatacgattgggtatagcggtttatgattgtaattttagtattttgggaggttaaggtaggcggatttttttagtttattagttgaagattatggagattagtttgggtaatatggtaaaaatttatttttataaaaaatataaaaattagtcgggtgtagtggtgtatgtttgtagttttagttatttgggaggttgaggtgggagtggagtttgggaagtggaggttgtagtgagtcgagattatgtaattgtattttagtttaggtagtagagttagattttgttttataaaaaaaagcggggaggtgggggggcgtataaatgaattttaaaagtaatatgtttaagtgaaagaagttttataaaggtattttttatagaggttgagaggttcgaggttgaggggttgtatttggtgaaaatttttttgttggtggggattttgttgagttttgaagtcgtgtagggtattatatcgcgaggggttttagtgtgttagtttaggtttttttttttttttttataaagatattagttttatttttacggtaatttattaatttattaatttttgagtttattaatttattaatttatttatgaggatattatgatagagtttttatgttttaatcgtttttttaaggttttattttttaatattgttatattgaggattaaattttaacgcggattttggaggaatagatatttaaattacggtaattttttgtatatgaaattttggaaaaggtaaaattatagggagagaagatagattagtggttgttgatgttgggtgatgggcgaagttgattaagaggttggagtagttttatggagggacggaattgttttagattttgattgtggtggtgattatataatattgtatatttgttgaaatttgttaaaataaagtttttgattttatggagttttcgttttattgaggggagatagagtaaataaaaattaggagtcggtcgtggtggtttacgtttgtaattttaataatttgggaggtttaggtgggaggattatttgagtttaggagtttgagattagtttgggtaatatagtaaggttttatttttattaaaaataataaaaaaattatttagggtggggtgggatgtgtttgtagttttagttattttagaggttgagacgggaggatcgttttaatttaggagtttaaggttgtagtgagttatgattatgttattgtattttagtttgggtaatagagtgagattttgttttaaaaaaataaaataaataagaataatattaaaaaataagaaaataaagaaaaacgagtaataatggaattaatatttatttagaggatagagtattttttatgtattttgttatttttttaggcgtttttatgatataggtgttgtagtttttattttatagatgaggtaatttaattttagagaggttaagtgatttgtgggaggttatatagttagggcggaggagatagaaatagaatttacgatattcgattgtagaatttttgtttttattcgtgataatatattggtggtttaacgtttttttcggatattaaagtaatttttattgagaagtgacgttaagttatagtttttattttagtcgtgattttcgatagtggtttaataggtgattaacgggaaagcggtagtgtttgttatatacgggaggttagtaggtggtattagagggtcgttcggttgttttttttgcgttttagtttgtcgtagtttttagcgtgtttcggaagtgacgcgatcgattcgttggggcgcgttttttttattacgaggttattagggtgattgcgggatttcgatttgcgtcggagttgcgatgttagagtatttttgttatttttattttacggacgtgttgtagtgatattagaattttgcgtgcggtttattcgtgtttaatttttttgcgtttcgtttttgaatcgtatttatttgagtattattagattgatttattttaatattggtggggggtagcgaggttagttatgggttttttttttttaa

SEQ ID NO: 85 - DNA, 8111 bp, Artificial Sequence
  chemically treated genomic DNA (Homo sapiens)
aaatgggtatgttttggggttagatttggaggaatagtagagattggagtgttagaaggtgagtatgtttgggggtgttggggagatgtaatttattagggatagtttagtgttaggggattagattggggtttatgaaggagaggtagaggttgatgggtttaggggtggtgtgggtaggtgagtttttttagatagtgattttgttttgttttttttttagttaggtttttttttttatttttttttttttttttgattggatttttttgggagagttattttttttggttttttttgttttaatttttttattagttggttattattatttattattattttaagttaaatttttagatttatatggggttaggatattggtattggattaaagaggtttttttttttgttttttttttgtttttttaatgttttgttgtaaagatttaggcggggagagagagagagagagagagatagagattgatttatagttagggttagggaattgaggggaattaatttaatttttttttttttaatttattaggtttgtattttgttttttttgtagattagtgttttgttagttatttgggggttaggggatggagtgaaggataagatttttttttattgtagtgaagttatttggagaaatgtgtggaaaatagtaagatttagtgattttttttttattttttttttaattttaggagagattttgtttttttatttatcggtttttagattaattatttatatttatataggcgagagtttttttgaatattggaggtgataggatattaggataaagtataattattgtgttttggtttaattattattttttttgtttggggtcgtcgttggtttttggttgtttttcgtatttttttttatttttattttttttttttttttttttttatttggaatatttttttttttttttttggttttttttgaattgtttttagagttatagattgtggggagtggttattgcgtttttaaggtgaggttttttaagcggggtcgagtttgttttttaattgggagttagtatgatttttgtgtgggttgttttttgttttattgtttttttttttaatttgttaggtgattttgggtttttttgtgttttttttgggttttcggaggattttttggggagatagtttgttttgacgtttttttttttgtagtaagtagtttggggagggaggtgaggataagtgaagttaagttgtttagggggttaagtttatggaagggaagatgttatagagatatatgtggttttgtgattgttgttttgtgttttttttttttttttgaaagtttaggtgattaggtgatttgagtttttaatttggtgataatgtgggtattggttgagtttttaagagtatattgttgtaaatgtcggtgataatatattggggtatgggatttagagttaatttttttaggttatagttaggttatatttttataatgaaggggggaggtgggttatattttttcgttttaatgaaggtagtttaaaaatttttaggttaggttgtaattttagttttatataaaaggaattttgtgtttttatttttttggatttttgggtaaagttttagagggaaatataaataggttgttgtaatatattttgttgggtattattatggaggatagttggtttatgggggtggggggtgtttggggttacggagtgattggtgatggttatttttttttggaatttttttagtttttttttagttttagatttgtttatttgttttttattaagatttgtttttttaggtttgttggtttttttaggggttgaagaaggtcgagttgagaagggatgtaagggagggggttagaatgagtttttagggtttagagtttttattttgttttaagatgtttatagtttgtgtttttggggtgttagaggcgtataaggaggaaagttagtggttttttttttatatttcgtttattagtttagagtatggagtttaggtgaggaggtttgtttgggagggggttttgagttaggaaataaatatttattaattgtataaagattttgtttttgttgttggggagtttgttaagtggtggagataggattagtgtacgaatgatggaaagggagggttggggtgggtgggagttagtttttttttttataagggttttaggatattatatcgatggaattgggggtattggggaggtaatttagtatttttattaaattatagtaatatgtgttgaggatggggttgattaggtaagttttttggagcgttttggttaaattgagggaaattgttgtatttttatttttagtttatgtttttatagaggttatgttagttgtaggttagattttggtaagatttgggtggataattagattgattggttttattttttttataggttttagagttttaattttgttttttggggtagtttggaaatagttaggttagaaattagttaggaatttttttaagttgttttttatatgtaagaatgggatgggggtttttgggagtatttagggaagatgtggagagttggaggaaaagggggtttggaggtaagggaggggattgggggaaggataggggagaagttgtgagtttggagaagtagttaagggattttgagggaatgggggagttgagacgaaatttttatttttatttagaagatgagttatgagtttgggtttgggttgatagaagttttggtttttggtttggtgggagttttgggtagttggtttatagacgttttttagtgttggcgggtaggtttgaattattacgtaggttttggtttttattcgtttttattagttttttggttttagttttttggtaatatttggggttgggggggtagtaggaataagggtttttgtttgtttagttgtttttttttttgggttttgttagattttatagtgtatacgtgggttttaataggttttttttttttttagttattgattaatttcggaattatatagtttttcgtttttagttttataaatttggtgttaaattttttttttttgggaagtatttttggatattttttaaaggattttagttattttagtttgttggttgtcgtttattttgatgtttgtaggttagatgagggttttagatggtatattgttagagggatatattgtggtttttgtgtttagttttgggttttttgtatatgaagtaattttagttttaaatatgtagttgtttgggaggttagaaatagggggtttaggagtaaattttttttattttttttttaaagtttattttttttttagttagagtcggggtgtgtagacggtagttattagggggcgttcggttattatagggaagttgggtgaatggagcgagtagcgttttcgagagtgaggacgtgtgtgtttgtgtgggtgagtgagtgtgtgcgtgtggggttgagggcgttggagcggggagaaggttaggggttattttaggattttaatagatttgtgtgtttttttttttattcgtttttgttcggtttttcgtttttttttgttttttttaatatttttagtaaagagggaacggtttttaggttttgttcgtacgtaattttatttttttgtttttttttcgttaatgtttcgcgggcgcgtgtttttggatagagttttcgggggcggatgggtaatttttaggttgtgaattttggtgggggtcgagttttttttttattgcggcgggttgcgggttaggttttattgagcgttcgtagagttcgggttcgagtcgcgtgtggaagggttgaggttcgtttgttttcgtttttcggggcgggtcgggggcggggtttcggcggggcggagttatgcgttttttttttttttttttaaaagtcggttggtagcggggaggatcgcggaggtttggggtagtcgggtagttcggaggtcgtggcgttgggggttagtattagcgttttgtcgggaggcgtagcggttaggtggatcggttagcggatttatcggttagggcgttcggtgttggaatttgatatttattgattcgggttttattttttttttttttttttaaatatttttttttaaaattgtattgtttttcgttttaatttatttttgtttgttattttttatttgaatcgggtcgacggtttggggagattgttttatttttttaaattattgtggattttggaaattagtagaaagaggaaagaggtagtaagagttttagagagaagtcgaggaagagagagacggggttagagagagcgcgcgggcgtgcgagtagcgaaagcgataggggtaaagtgagtgatttgtttttgggggtgatcgtcggagcgcggcgtgagtttttttttttgggatttcgtagttgattagtcgcgttgacggatagatagatagatatcgtttttagttttagttattatttttttttcggtcggcggcggatagtggacgcggcggcgagtcgcgggtaggggtcggagttcgcgttcggaggcggggtggagggggtcggggttcgcggcgtcgtattgaaatttttcgtttaatttttgggttgttttcgtttcggaggagtcgtggttcgcgcgggggaagtcgagtcgagcggagtcgcgagaagtgttagttcgggtcgggaggagtcgtagtcggaggagggggaggaggaagaagagaaggaagaggagagggggtcgtagtggcgattcggcgttcggaagtcgggtttatggacgggtgaggcggcggtgtgcgtagatagtgttttagtcgcgcgcgttttttaggttttggttcgggtttcgggtcggggaggaagagtagttcgtcgaggcgtcgaggagagcgggtcgttttatagttcgagtcggagagggagcgcgagtcgcgtcggtttcggtcgggttttcgaaattatgaattttttgttgttttgggtgtattggagttttgttttgttgttttatttttattatgttaaggtaagcggtcgtgttttgttggcgtcgcgggtcgttgcgagcgtttttttcggttggggacgtgcgtgcgagcgcgcgcgtgggggtttcgtgttttacgcgggtttatgggtattaggcgtgcggcgtttttttttgtcgttttaggtgtagggggagggggcgcgcgcgttaggtgggagggtattcggagagaggtttatcgtttacgcgggttttgtttatttatcggagttatcgtacgtacgatttgggtcgattagtcgagggcgggagtcggaggaggaggtcgagggggttgggtttgcgttgtcgttgtcggttgaagtttgttttcggtcgttggtttcggacgaattggaagtttgagtagcgggggcgggagttagagattagtgggtagggggtgttcggattttggatcgcgggagggtagagagcgtggagggggtagggcgtaggagggagagggggtttgttgttattgttattcggtttttttagttttcgtcgcgagtttgggaaaagttttggggtggattgttgcggggattttttttttttgttgggttatttgcgtcgcgttaatttcgttcgttttcgttcgcgtttcgttcggtgttcgttttttttcgttcggtcgggtgcgcgcggcgcggagtcgattatattagttcgggtttggtcggtcgcgtgttttcggagtttcggttgttcgaatggggagtttagagtggcgagcggtattttttttttcgttagtttttcgcgggaaggtgatttttcgaggtagttttagttcggggatttagagaattatttttatttttttttattgtttttagattttatttttgtttagtgttaggaggaattttttgacgttttttttttttatttattttttttttagtttggagagaagtttttgttatttcgtttatttttatttttttttgcggagaagatttatttaatttttttttggttttagagtttagggaaaggatgattattgttagaagtcgtggcgcgggagtttattgggcgttttgttatattttatcgaaagtttcgatttggtgatagtgtgttttttttttttcgttaatagtttcgagtgagttgtgttttagttttcgtgggggtgggttaagggaggatttgaagagttattgttttattttatttttttggagaaatggtttgaaatttgttgtgatacgggtagtatgggaatagttttttttgaattttggaaaggagtttttgttagttttgtatatattttgttttggtgaaaggtagttttggagtaggtgtttttttggaattttaaatttgtttatttaatttgtttttgaaagggattttaaagggttttttttcgtttttttttgacgtttttttttagttagaatttttttggagaggaggtaagaggaaagttatggataggggtcgttgttaatatcgtaagttttttagattttggtataaaggttttggttataggtttttaagtagggaggagggggaggagtggttgtttggttatagtgtgatttttagaggtttttagagaaggatatttggtttttgtttgtttagaatcgttttttttgtgttttttggttttggaaggggtatgaaattttcgtttttttttttttttggggtttaggaggagtggagggtttcgggagaatattgttagggggaaggtagggggtgttatgggaatgggtgagggggttgaggtgtagaatttagggggtttttgtaggagtcgtagtggtaagttgtttagttggaagtttggtaattgttgtttttttttgagaggggttttttgtgattttggttgtttttgggagtagggttggggtatttgagtggggtgtatttggggtgtgtgggaaggagagggaaagaaagatggatagtgggatttttttttagtagggtttggtgtttcgtaggttagagtgtttttttgttttgcgagtgttgggcgggaggggagttggtgagagttggagatttttaggaagggttggtagaagtttttttttttgggtgttgttaggttcgtatgttttggcgtgttgatttttatagtttttggcgaggggaggaatgatttgatgcgggtggggagggttagaggaggttttaggtttaaggtggtgtagggggttttttaggggttgggtagtgttaaggtataaaagttttttttggtttttggtggtatttgaaggtgtttaggtgagaggggtttggtatttttttattttgggagggagaagaaattagggaataggtaggagtgggagataggtgaggttttggaaatttattgaggttttggagagatttgtgtagagaggaaaatgtggtttttttttagggtttttttttgggtttttattttttaagtaatttgtgggtatgttgggttatttttaaggattagaagagtttggatgggggagggtggttggtgtttttcggttttcggtattttttttcgtttttaatattagtttattttggtatttgttatgttagtaggagaaggttattatgttgtttttttcgtttttagttttttttttttgttttagtttaaatttgtttttttatttgattttaatatttattatggttttggattagggaattagggggatagtgagagtagggagagggaagtgtggggaaggtataggggatttcgatagtgaagtattttggggttttttttttgtatttcgagttttttagtttttaatatttggttagtttttaattttttcgggtttataattatagtagtttaggagtggtgggtatattttgtgttcgtggggattttcggttgtgttttgttcgatttagaagatttggagaagttagaggttgttggtgggagggaagtgaggagggaggaggggttgggtggttgggtttgtgtattttagtttttgtttatgtttatgttttgttttttttttgtttttagt

SEQ ID NO: 86 - DNA, 8111 bp, Artificial Sequence
  chemically treated genomic DNA (Homo sapiens)
attgaggatagaaagagagtaaggtatgggtatgggtaggggttggggtgtataggtttagttatttagttttttttttttttttattttttttttattaatagtttttggtttttttaagttttttgagtcgaataggatataatcgggggtttttacgggtatagaatatgtttattatttttggattgttatggttatgaattcgaggaagttaaagattaattagatgttgggggttggggagttcgaaatgtaggaggaaaattttagaatgttttattgtcgaggttttttgtattttttttatatttttttttttttgtttttattatttttttagttttttggtttaaagttatggtaagtattaaggttaaataggaggataaatttggattggggtaggaaggaaggattaggggcgagaaaaataatatggtgatttttttttgttgatatgataaatattagggtgagttggtgttggagacggaggggggtgtcgaggatcgaagggtattaattatttttttttatttaagtttttttagtttttaggaataatttagtatgtttataggttgtttagagggtaaaaatttaggaggagattttgggggagaattatatttttttttttatataaatttttttagagttttaatagatttttaaagttttatttgttttttatttttatttgttttttggtttttttttttttttagggtgaggaggtgttaagttttttttatttgggtatttttaaatgttattagggattagggaaggtttttatgttttggtattgtttagtttttagggggttttttgtattattttaggtttgaggttttttttaattttttttattcgtattagattattttttttttcgttagaagttgtgaaggttaatacgttaagatatgcggatttgatagtatttaaaaggaaaggtttttgttagttttttttgggggtttttagtttttattaatttttttttcgtttagtattcgtagagtagaggggtattttagtttacggaatattagattttgttaggggagagttttattgtttattttttttttttttttttttttatatattttaaatgtattttatttaggtattttagttttgtttttagagatagttaaggttataggaagttttttttaagagaaaataatagttattaggtttttagttggatagtttattattgcggtttttgtagggattttttggattttgtattttagtttttttatttatttttatgatattttttgttttttttttgataatattttttcgggattttttattttttttgggttttaaggaggaaaggggacggaaattttatattttttttaaggttagggggtataggaggggcggttttaggtaggtaggggttaggtgtttttttttgggggtttttgaaggttatattgtggttaggtagttattttttttttttttttttatttggaggtttgtagttaaggtttttgtgttagggtttgaggaatttgcggtgttagtagcgatttttgtttatggttttttttttgttttttttttaagggaattttggttgagggaaggcgttagagaggagcggaaagggattttttagagttttttttagaagtaagttgggtgggtaggtttggagttttaaaaaaatatttgttttagggttgttttttattaggataaagtgtgtgtaaggttggtaggagtttttttttagggtttaggaaggattatttttatgttgttcgtgttatagtaaattttaagttatttttttaaaagggtaaagtggggtaatgattttttaaatttttttttgatttatttttacgagagttaaagtatagtttattcggaattgttggcgagggaagggaagtatattgttattaagtcgggattttcggtggaatgtgataaagcgtttagtgggttttcgcgttacgatttttgatagtgattattttttttttggattttggggttagaaaggggttagatggatttttttcgtagagagaaatgaaaataagcggggtgataggggtttttttttaggttaaaaaggaaatgggtgaagagaaggggcgttaggaaattttttttagtattgggtagaggtagggtttggagatagtaggaaggggtagggatggttttttggattttcgggttggggttatttcgagaggttattttttcgcggagggttggcggggggaggggtgtcgttcgttattttgggttttttattcgggtagtcgaggtttcgggaatacgcggtcggttaggttcgggttgatgtaatcggtttcgcgtcgcgcgtattcggtcgggcgggggagggcgggtatcgagcgggacgcgagcggggacgggcggggttggcgcggcgtaggtggtttagtagggagggggggttttcgtagtaatttattttaaaattttttttaaattcgcggcgagggttgaagagatcgagtggtagtgatagtaagtttttttttttttttgcgttttgttttttttacgttttttgttttttcgcggtttaaggttcgagtattttttgtttattggtttttggttttcgttttcgttgtttagatttttagttcgttcgggattagcggtcgggagtaaattttagtcggtagcggtaacgtaagtttagttttttcggttttttttttcggttttcgttttcggttggtcggtttagatcgtacgtgcggtgatttcggtgggtgggtagggttcgcgtgggcggtgagttttttttcgggtatttttttatttagcgcgcgcgttttttttttttgtatttaagacgatagagggggacgtcgtacgtttggtgtttatggattcgcgtggggtacggagtttttacgcgcgcgttcgtacgtacgtttttagtcgggagaggcgttcgtagcggttcgcggcgttagtagggtacgatcgtttattttggtatggtggaggtagagtagtaaggtaaggttttaatgtatttaagatagtagaaagtttatggtttcggaggttcgatcggggtcggcgcggttcgcgtttttttttcggttcgggttgtggggcggttcgtttttttcggcgtttcggcgagttatttttttttttcggttcgaggttcgggttagggtttggggagcgcgcgcggttggagtattgtttgcgtatatcgtcgttttattcgtttatgagttcggttttcgagcgtcgagtcgttattgcggttttttttttttttttttttttttttttttttttttttttttcggttgcggtttttttcggttcgagttagtatttttcgcggtttcgttcggttcggtttttttcgcgcggattacggttttttcgaagcgagaatagtttagaagttggacgaaaagttttagtgcgacgtcgcgagtttcgattttttttatttcgttttcgggcgcgggtttcggtttttgttcgcggttcgtcgtcgcgtttattgttcgtcgtcggtcggggaggaggtggtagttggggttgggggcggtgtttgtttgtttgttcgttagcgcgattggttagttgcgggattttaagggggagggtttacgtcgcgtttcggcggttatttttaaaagtaggttatttattttgtttttgtcgttttcgttgttcgtacgttcgcgcgttttttttgatttcgtttttttttttttcgatttttttttggagtttttgttattttttttttttttttgttggtttttaaaatttatagtgatttggggaagtagagtaatttttttaagtcgtcggttcgatttaagtggggaatggtaagtaaaaataaattaaaacgagaaataatatagttttaaaaaaaaatgtttaagaaaaaagaagagggataaaattcggattaatgaatattaaattttagtatcgagcgttttggtcggtgagttcgttgatcggtttatttaatcgttgcgtttttcgatagagcgttggtgttagtttttagcgttacgattttcgagttattcggttgttttaagttttcgcgatttttttcgttattagtcgatttttaaaaaaaaaaggggggggcgtatggtttcgtttcgtcgggatttcgttttcggttcgtttcggggggcggggataggcgagttttagtttttttatacgcggttcgggttcgggttttgcggacgtttagtgaagtttggttcgtagttcgtcgtaatgaaggggaagttcgatttttattaaggtttatagtttgaaaattatttattcgttttcggaaattttgtttagagatacgcgttcgcggggtattggcgaggagggagtaggaaagtgaggttacgtgcggatagggtttgagagtcgttttttttttgttaggaatattgaagggggtaggggaaggcggagagtcggatagggacgggtggggagagggatatatagatttattggaattttggagtgatttttggtttttttttcgttttaacgtttttaattttatacgtatatatttatttatttatatagatatatacgtttttattttcgaagacgttgttcgttttatttatttagtttttttgtggtggtcgagcgttttttagtgattgtcgtttgtatatttcggttttggttaaagagggaatgggttttggaaagggggtggggggagtttgtttttggattttttatttttgattttttaaatagttatatatttgggattggagttgttttatgtatagagagtttagggttgggtataggggttatagtgtgtttttttgataatgtgttatttggagtttttatttggtttgtagatattaaagtgagcggtagttaataggttggagtgattggggttttttgggaagtgtttagggatgttttttaggggagaagaatttggtattaagtttgtggagttgagaacgggaagttgtgtggtttcggggttagttagtgattgggagggaagaggatttgttggagtttacgtatgtattgtggagtttggtaaaatttaaagggggaggtagttgggtagatagaggtttttgtttttgttgtttttttaattttagatgttgttagggaattgaggttagggggttggtgggggcgggtggaggttagggtttgcgtgatgatttaaatttattcgttagtattaaggaacgtttgtaggttagttgtttagagtttttattaggttaggggttaaggtttttattagtttaagtttagatttatagtttattttttgaatagaaatgggggtttcgttttagtttttttatttttttaggattttttggttatttttttaggtttatagttttttttttattttttttttagtttttttttttatttttaagttttttttttttttaattttttatattttttttaagtgtttttaaaggtttttattttatttttgtatataggaagtagtttggaaaaatttttggttggtttttgatttggttatttttaggttgttttagggaataaagttggggttttgaggtttgtgggaagagtgggattagttagtttgattatttatttagattttgttagggtttggtttatagttggtatagtttttgtggaggtatggattgagaatgggaatgtagtaattttttttaatttaattaaaacgttttagggagtttatttagttagttttatttttagtatatgttgttgtggtttggtggaggtgttaggttatttttttagtatttttagttttatcggtatggtgttttaaggtttttatgaggaaaagggttggtttttatttattttaattttttttttttattattcgtgtattagttttgtttttattatttggtaggttttttagtagtagggataaggtttttgtatagttagtaaatgtttattttttggtttagggtttttttttaggtaggtttttttatttgggttttatgttttaggttgatgaacgggatatggaagggaagttattaatttttttttttgtgcgtttttagtattttaggagtataagttgtagatattttggggtaggatggaggttttgagttttaagggtttattttggtttttttttttgtatttttttttaattcggttttttttagtttttaaaagagttaatagatttgaaagagtaggttttagtaaaaaataaataaataaatttgaagttaagaggaggttggaggggttttaaggagggatagttattattagttatttcgtggttttaggtattttttatttttataagttaattgttttttatggtggtatttagtaaggtgtgttataataatttgtttgtgtttttttttggggttttgtttagggatttaggggagtgagggtatagaattttttttatataaggttaggattataatttggtttaggggtttttgagttatttttattagggcgagaaagtatggtttattttttttttttattgtggagatataatttggttgtgatttggaggggttaattttggattttatgttttagtgtgttgttatcggtatttataataatgtatttttaaggatttagttagtgtttatattgttattaaattaaaagtttaagttatttagttatttgagtttttaaaaaaggggaaaaagtataaaataataattataagattatatgtatttttgtggtatttttttttttatgggtttagttttttgaataatttgattttatttatttttatttttttttttaggttgtttgttgtaggggaaggggcgttagagtagattgtttttttaaagaatttttcgaaggtttagagagggtataaaggggtttagggttatttagtagattgggggaaggggtagtgaagtagagagtagtttatatagaggttatgttggtttttagttgaggggtaaattcggtttcgtttggagggttttattttgggagcgtagtggttattttttatagtttgtggttttgaaggtagtttagaaggagttaaggaggaaggggaaggtgttttaggtgagggggaaggggagaaaggggtgggggtggagaaaagtgcgaaaggtagttaggagttagcggcggttttagataaagaaagtagtgattgggttaaggtataatagttgtattttgttttgatgttttgttatttttaatatttagggaaattttcgtttgtgtgggtgtgggtggttaatttagaagtcggtggatgaagggataaaattttttttgagattggaaagaaggtgaggagagagttattgggttttgttgttttttatatatttttttaagtggttttattgtaatggaaggaggttttgttttttattttattttttgatttttaggtgattagtaggatattgatttgtaggaagggtaggatataaatttggtgaattgaaggagagagaattgggttggttttttttaattttttgattttgattgtgggttaatttttgttttttttttttttttttttttttcgtttaggtttttgtaataaagtattaaaaagataaagagaaagtaaaggaaagggtttttttggtttagtgttaatgttttagttttatgtggatttggaggtttgatttgaggtaatgataagtaatgatggttaattgataaaaagattggagtagaggaagttaaggagggtaatttttttaagaggatttagttaggaaagggggaaggaatggggaagaggatttagttggagagagggtagggtagagttattgtttggggaagtttatttatttatattatttttaggtttattagtttttgttttttttttatgggttttagtttaattttttgatattaagttgtttttgatgaattgtatttttttaatatttttaggtatgtttattttttgatattttaatttttgttatttttttaagtttgattttaaaatatgtttattt

SEQ ID NO: 87 - DNA, 11523 bp, Artificial Sequence
  chemically treated genomic DNA (Homo sapiens)
attgtttaagacggaaagattttaagattgtgtgattttttttttttttttttttttttttttttttttataggtgtagaataattttttttttttttttcgtggttttttttttttttattttttttttttgttgtttgtaaagttgaatttggggttaggagttttaattgtaattttagattggaattttagatggtgcgtttaggattggaagtaatttttagtttattaattttatgggtttacgtatttgttttggttacggtttggtttttatttttattgtggtattaatgtagaataaattgagatatattttttatataattagttttagaatttaaaaagatttacggtataataatagaggtagtgtcgcggaatttttttattgaggattttcggggagttcggggattatttcgcggtggtattagaatagacgagtaattttagcggttttaggtattgcgaattgggggagagggggaaattttgtatcgtattcggtagtatttaacggtttcgggtttttagatagggttagcgaggagagttaggatagtaagtggggattggttaaaaaaaatcgatttaattttgaaatgattagaagaagttgggagtagttattataaagttttttttttgtttttttttttttttaattgaaggaatgacgttgaaatttttatcgttagcgcggggttgggaattattttaaatatttgttttgtagtttcgagtgggtagatttcgaagagttggagtcggcggggaggggaggaatagttgttgggttgttttgcgcgtggggttcggggcgcgggtttcggggagaggcgttagtcgaaagtttgtttttttttcgcgataggtagtagcgaggtcgagttattttttattacggtttgcgggtttcgcgcgtagtgtggttgttttcgtttttgatcgatcgtagcgttttggggtgtttatttagttgttcgcggtcgttgggtgattttcggagggcggtttaggcgtgcgtattggtttttggggttgcggttgtagtagtttagtttcgcgttttgttagatgtagtggatagcgtcggggtgaaagtaagggttgagaaatttttattgttttgtttttatttagtttcgatttttttatattgtaataattatgtattttcgaggtcgggatgtttgcgttttgttagtgtattaacgttatatggttttttaggggttgttttcgtttttgtattttattagttttgaagaggtagaggggtggtgggtaaaatttttaattggacgttgagagattcgggttttagttcggcgttgttattaatttgttttttgtttttaaatagtagtagtaataaaaattgtaaagttgattgagttaaaggtttatattgtttttttatttaatttttagaataattttatgaggtgggcgttagtattttattatttcgtttgattagtaaggaaattgaggtttagagagattgcggaattcgtttagggttatatagttgttggttatttggtagagttgaggttttattttggggttattaattttttgttttttatcgttgcgttttatagattgtttttttttcggttgtttgggttttagtttttttttttgtaaaacgagaagtttaatttgtagttttttttgttaatcggtggtttagattaggaatttttgttatagatttcggcgttgataggggtaagaaggtgggtgaaagaagggggcgtttagttttttatagtttgtttttttttgggatttcgcgaagggcgggtttcgcgagttaaaggaggtataggagagcgtttatcgttcgcggcgggtgaaggtgttatttgttttcgtgttaggttgtgagttttggtgtttagtttagggcgttaaggttagtgtagttggtatgttttttttggaaaattttaggtttttcgtagagaacgttatttataataaagaagaggatagagaggtatggagcgttttgcgattgtaggagtacgttagttttttagcgttggtttagtgtcgtttgggttttcgggtatgtggattcgttggggtcgtacggagattttttgtcgggtttttggggtttttcgattgcggttttttagtttagtattttttttttggtttcgtaggttgtagggaattttttttatttttttagtcggagaagtttaagtcgggcgagggggtatttcggggttcgtatcggtgtttttttttttttcgtttttataaggattttgagaaaataaatggtagaggagagaggagttttatatttgtttggtttttttttttttttatttatttttatattttttatttcggggtaaaaatttatttttgaaaaatgttggtagagatttacgtgtttttgttttatttgggttttataaatataacgatttatatttaagttagtttttttttagataatttttttttttttcgttaaaagtgttaaggatggtaaaagaagaaataattttaattttttcgtttggaaatgaaagttttcggttttttataaagggtttttcgttttttatagttgagttttagttaagaaaaacgatttttaagtagaaataataggcggggagaaggaagggagatatagggatttggggggtttttagggtaattggtagtgaattttgtttcgagagttttttttttatttaaaaaattaaacgcgcgagtttcgcgaaaggtttagggatagatcgtgtgggagaggattgagtagagagcgtgggggtagtgttttgtagaatttttttttttttaataataattttaaaagtttttgagtggagacgacgtaaagttaagtagtaaaggtggtttgggaggtaagcggagggtttaagtgtcgtatttttatttttagggttttttgcgtttacgggatgcgtatttttaagaagtgcgtttttcgagtaagttttgggttcgtatatatttcgggttcgtagttagaatttaatggcgataacgtttatgtaatgtaagttaaaaattaaagcgtaaaaaattattatgttatttattgaaacgttattttttgttaaattgtaattattttgttttatataagtttggttggaaagtttgtagttttagttcgggttagttaggtataggaggtcggattgtaatcggttgtttttttttcgtcgcgtttggtcgttttacgttgcgtcgtcgttgttgttttttggcgtttttgggattttatacgtatttttgaaatacgtttcgtttcggttttcggtttttttttttgtttaggggttgttttttaatagatattgatttttttagaagatttaaaaattaaattaaaatattttttattcgttttaaatatttgttttggggcgcgggggttgttaaatagagattagacgaagggagttagatttagcgaagtttttcgagtttttaaagattcgaatattaattcgcgttcgtgggtcgatggaggttttttttattttattttttggtttttttaattggttttcgttttttggttaattattgagtaattagaatggtattttcgattagggttataggtagtgttcggcggagtggttttaggagttattcgttttttgtcgggtttcgtatttaaatttttttttttattttttttttttaaattgggcgttaggatgtttcggtcggaatatacgtaggttttgggcgtttgtttaagggttttttttttttttaaattagtcgttgttttttcggtttaatcgtagaagaattagatattttttattggaaagggaaattaagtgttgttgattttaattttaggtaggcggtaatcgtttttcgtttggcgtaaattttattaagtaaataattattagtcgatcgaaatacgttcggtttataattggtgtaattttcggttatttaattgagggacgttcgtttttagtttcgatttttggaatttataaagggttatttttttttttagtgattttaagattatggttatttttttattcgatagttttagaagtaagagttagatttaagggtgtaaagtaagggtatacgtttttttgaagtttgattgagttttttttgcgtttttttgaagttttcgtttttttggagtttatttgtttttttttttaaattatttttttagattaataattttatttttatttttatcgtattcgattttgttcggatttattgtttatttgaacggattttttagtgagacgaggtttttatattggcgaaggttaagaaggggaggtggggggagggttgtgttatatcggttagttgagagcgcgtgttgggttgaagaggagggtgttttcgagagggacgttttttcggattcgtttttattttagttgcgagggcgtttttaaggagtagcgcgcgttgtttggtcgggtttgggttgttgagtgaatggagcggtcgagttttttggttttttttttttttcgcgtcgtcggttttttttatttgagttttgggaagttgagggtagttaggtagttggggtaaggagtttaaggtagcgtttatattcgggggtttttcgtaattcgatcgtttgttcgtttttttatttttcgtttttttttttatttatttatttatttatttatttatttagagtcgggacggtagtttaggcgttcgggtttcgtcgttttttcgtcgcgattttggatttttttttgttgtaggattcggtttttacgtgtgtttcggagtcggcgttttagtatacgtttcgtttcgggtttgggtgtttatagtagttagagtagtagggagttcgggattcgggcggtatttgggttaagttaggcgtcgtcgaggttagcgttgaacgtttttagggtcggaggagtcgcggggcgttcgggtttgagtcgtagtaaatgggtttcgacgtgcgggatttgaacgcgttgttgttcgtcgttttttttttgggtggcggcggcggttgtgttttgtttgtgagcggcgcggcgtagtgggcgtcggtgttggattttgcgttttcgggcgtttcggtttacgggtcgttgggcggtttcgcgtcgttatcggtttcgtcgttattttcgtcgtcgtcgttttatttttttattaaataggagtcgagttggggcggcgcggagtcgtacgaggagtagtgtttgagcgtttttattgtttattttttcggttagtttattggtatagtcggagtttgtcgttacgggtttttcggttttttttcgtttagttaggcgttattcggttaggttaggatgttttttaacgcgttttatttgtttagttgtttcgagagttagttcgttattcgtaattagggtaagtaggtcggggagcgttttttacgcgcggggtagtggcgttagggatttttcgttttaggatattttttttttttattttttttgatcgtagtttttatttagttgttttttaagggtcgtgaggatagcggaagcggcggttggggaggaggtcggagagtgggagtgtacgtaggtattggttttcgatattttttaaagttaggtagagttaggagtttgattgttcgtaagagtcgggagggcgtttggggttttttagagttcgagagatttcgggattgttagtttttacgggagtggaattaggagatcggcgtagtgtttggttttgttttggggagagttttgttaattaaggaaacgttaaattgttattaagcgtagcgttttttagacgtttggattttggattcggagtgggattagcgcgggggtgagcgtttgtgttgtgttgttttcgtagcgttaaaatgtttaggagtatttttagtttttataatacggtgttggtatatatttaggtgtatattaagtatcgtagagaattagaatgagtatatgtatttttagtaattaaatggttttttggaatagcgtcgtgttcgtggatagttttcgcgtatggtaatatagaagtggatttttattgggtttcgtttaggcggcggttacgtaggttttggggatggaagagaatttgatttattcgagtttaagttatgcgggattaggttttatcgtaggtagtggaaggaggtacgagttttggttttttttttagcgtatttggggcgtttttttattttgtaaacgcggggtttagttgggatagtatttttttaagatttggggttagaataaggatagggttattcgttgtgtttagttaggatataaggagggaattcggtatacgataagtattaggttggttttttatttcgcgtcgatgttcgtttatttttttttcgtttgggcggcgcggattcgaatttgcggagtttttgtagtttgttttttttatttatttttagtggatttttacgttattgagaatttaagttagttcggtttgattcggtaatttagtaaacgttttattaatataatggcggatgttttttttggagtaaaattattcgagggtttagggatcgggatgtttttggaatgcgtgggaagtagagtgtattttttgtaggaggtattttcgtttaaggttcgggagaagggttttgtttttgttgttcgtttttattcgcgttttttaaacgcgcgtttttaggtcgtttttattttagtttaattaggagtattcggttttcgcgaagttttggagaaatcgaaatcgttttttttttcgggagaatttgggattattgttttgtggaggaatcgtaagtagatttaagggttgtttttattttatgtttttagttagtgaaattagtgttttgtatttaaggggcgttgggataatttattggtcgttgaggtttgtgttttttgattagatcgcgttatttttgtttagtaggttggtgttatttttggggagtttttaggttttagtgttttcgtttataagaggatagttgagatgggtaatttggagattgggttcggtttgaagttatattttatagatgtagaagcgttatttattatttttttggggttttaaatatggaattcggtaatttatttaaatatttgtgattgagaaataatgaattcgagagtattgtttgtatgtgtgttatttggaggcggttgagaaattatcgaatttatgtttttggggtataaaatattattacgttattatttttttagtatttttaggggatttttgaaatttgggttttgtcgtttcgtttgggttttttgtttagttttttttagggtaggtttggtgtttgggattttattatatgtcgtggggggtgggattgtgggttttgtagttagtaggtattatatttttggaaaatatttggatttttttgtaatatataggcgtggttgttatggagaaaaagttaaaaggggattaggattagtaggtgaatgtattttttttttttattttggagaaaaagtttaatggagagagggttttagatttaagttatatagtttggaagtattatttttaggtttaagttttgttttgtagtgaaaatagatgggtttattttatttagtttttgaggtttattgggtagtttggatgtgagaagcgtttcggttgttattttggagtgggtaagggtggttttcgagattttgggtttattttttggatttttagggtttttgttgtttttttaggaatgtagggtttggtttaagatttgggttgtgagaggtaagggtattaatttttaaaaatgtggaaatggttattagagcgttaaggttaaattttaggggagaggaattaaggtcgtttttggatttttagggtagtttagttatggtgtataggtaggggtaattgttggtatttatttataatcgtttaaaattttataagtatgtttatattttaaatttttaaatattatattttgtattttaattttgtaaatattaatttagtaaatattaatcgtttatttggttaggtattgggttttgaatattaattaagataatggtttcgagaatttttgtaagaagtttattagttaattttggagaggttttttgttttggatgaggaaatttaggttttatgagattaggtggtagaggtgggatttgaatttagattatgttagggtgtttttattttttttttagggattttggttttatcgttgagatggattttttttggtttgcgggaggggtattaaatttttagtttatgtgtgggggttgacgggtttgtgagggtagatgtggggtgaggatttgagtagttttagattagatgtaaggtttaaggaggaggggaaaaaagtttgtttgggtcggacgcggtggttcgaggcggttggattatttgaggttaggagtttgagattagtttggttaatacggtgaaattttgtttttattgaaaatataaaaaaaaaaattggtcgggtttggtgacgggcgtttataattttagttattcgggaggttgaggtataagaatcgtttgaattcgggaggttgaggttgaagtgagttgagatcgcgttattgtattgtagtttgggcgatagagcgaaatttcgtttcggaaaaaaaaaaaaaaaaaagaggttgtttgttagtttattgatttcgtagtttcgtaggttcgtagaattttaaggtatgattaggtttgggattattaggttattttagggttaggtgcggaggtttgcgacgttcgagggttaaaggttttttttttcggttatataggagagggtattttgttgggggataggttttttttaattatagtgtagttgtagttatcgtttttagttttttgagtatttttttggttgagtttgttgtttattttattttttagtttttacggttcggttaggttaggcggttttcggtttttttgtagtcgtcggcgggggaggagggtatagagcgcgtttcgttttttagcgtacggttaaggttgcgtttttttttcgggtcgggattaatcgtgggaaaggcgttattttggttattcgattttttttttttaaggtttgtataaggagtttttgaatacgttgttttttttagtcggtagttttattttttttggtttttgttttcgtatttttcgcgttaggttaagcgttgggtttagggatagcgcgttttaattaaattcgtgttcgataagtttttaattaaaagagattttttttcgtttcgtaggcgtttttattattgtttttttcggggggatttgaaggagagggtttgaggtcggtttttgttcgtcgaggtttgcgtgttcggtttgggaggaggtttaggagggttcgcgggttacgggtatttttgggttcgagttttggggtgcggacggacgtttcgagagtgggtgtcgcgattcgggatttacggttttcgtcgggtacggatagttgcggagtagggttttgaggattgtgtagtgttttgggtttttgtttatttttgggtttaggaatggagaagggttcgtttagagaaaattttttcgtagtttttatttcgtttttttttttttttttttttttttttttttttttttttttttttttttttttttttttgtgtttgtttttttttttttttttttttttttagtgtttttttagaaattcggtttttatttcgggtaatagtgggtgttttgagttaaatttcgtttgtaagtttatttataggttttaaagaaggttaggttttaggttttaaaaggaagtttgtggaagtttaaacgtgttcgtttatgtaggagagttaacggggtcgggggttatttttgtttatttagtaggagagaaatggaggttttcgaggttatatgataaaagttagtggttttttaaatttttagtgtgtggtgttgagtagtgtgtgagatttaagtttggatttgtattattcgggagttaggatttgtttttttttttttttttttgtattttgttatattattttttaggtttatgtttttgttgttttagagaagttttttttttttttttttttttttttttttttttgggcggggggtggtggtgtgtgtgtatgagcgttcgtgtgtgtttcgaaaatggaggtaacgatgttttgggttttgtttatcggttgagttttgtttaagtttttggaggtattttggttaaatagtgtaagagtgggagaatgggtgttgtttgatttaatttatttttgagaattttgtgaagtttggagatttagggtagttttgggttaggaggatttgaggttgttggggtggttttgttaggattttataggagtagttttttttagttattgtgtttggattttaggttatagatttcggaatttgtagaggaatgagattttatttttgggtttcggggttaatgacgtatttttagtcgaaggatttttttttttagaggtagtaatagttttttagaagtttgtggggtataagtttaaagtaatttaataataaaaattataaaagattatgttttttaattgaggttttacgtttttttttttattttgggggggggggggaatgttaggatttttttagggggaaattgaggtaaaggatcgaagtattattatggagggaaagggagatatagtgttaggtatattttaaaggaaattggttgtttagtttggggagtgaggaagttggtttttatagtagtggttagggtcggatttttgggcgtaaggtgggttttataggggggaggaggaggagagcgtagggtcgttatttgaaggtttaattggaaggggtttttgtttttttttttattagtttttttttgggtgttatggtgttaggtcgggtagttttagatagataatattattcggtaattattttttttatttttaagattaggttatttaattggtttcgagtaattaatgaaagttggtgcgcgggtttttgatttatagttcggagttaacgcggggttagtttagtagatttatttcgtttgttcgcgttgtttttgcggaagagttgtagtttatttttggggggtgaataattttttttgtcgattaggtaacgagttttatatttaatttgttaggggttcgttgtagaagcggtagagatcgtagaagattgcggtataaataaattgggaaaaagcgaggtgggggttttagttagaaaaggatggagaagtttgttttaaggttatatttagggatttgggtcgtttttttgtcgaaagttttggaggtttgtggggttggattttttttcgttgggggttcgaatgcggggtttagcgtatatttttttcgttcgtggttggtttagatttattgtttcgttttgcgagagtatcgttgatattgtgttttttttcgtcgttttcgtagg

SEQ ID NO: 88 - DNA, 11523 bp, Artificial Sequence
  chemically treated genomic DNA (Homo sapiens)
tttgcgggagcggcggagagaagtatagtgttagcggtgttttcgtaagacggggtagtgggtttgaattagttacgggcggggggggtgtgcgttgaatttcgtattcggatttttagcggaggagaatttagttttataagtttttaggattttcggtaggaagacggtttaagtttttggatgtgattttgggataggtttttttatttttttttgattaaaatttttatttcgtttttttttaatttatttatgtcgtagttttttacggtttttgtcgtttttgtagcgaatttttggtaaattaagtataaaattcgttgtttgatcgatagagaaggttgtttattttttaaaaataaattgtagttttttcgtaggagtagcgcgggtaagcgaaatgaatttgttgggttaatttcgcgttgatttcgagttgtaaattaggggttcgcgtattaatttttattaattattcggagttagttaaatggtttggttttaaaaatgggaagagtaattatcgagtaatgttatttgtttggggttattcgatttgatattatgatatttaagggaaagttggtgagggggaaaataagggttttttttagttgggtttttagatggcgattttgcgttttttttttttttttttttatgggatttattttgcgtttaggggttcgattttgattattgttgtaggagttaatttttttattttttaggttggataattaattttttttagagtgtgtttgatattgtatttttttttttttttatggtagtgtttcggttttttgttttagtttttttttagggaaattttagtatttttttttttttttaaagtgagaaaaagagcgtggagttttagttggaaaatatagttttttataatttttgttattaaattgttttaaatttatattttataagtttttggaaagttgttgttgtttttggggaaaaggatttttcggttaaagatacgttattggtttcggaatttaaggatggggttttatttttttataagtttcggagtttgtggtttgaagtttagatataatggttaaggagagttgtttttatgggattttggtagggttattttagtagttttagatttttttggtttaggattgttttgggtttttaaattttataaaatttttaggagtaaattgggttaaatagtatttatttttttatttttgtattatttgattaaagtgtttttaaagatttaagtaggatttagtcgatgagtaggatttagggtatcgttatttttattttcgaaatatatacggacgtttatgtatatatattattatttttcgtttagaaaaaaaaaaaaagaaaaagaaaaaaaaaaagtttttttggggtaatagaggtatgagtttggagggtggtgtggtagagtgtaagggagggaaggagggggtaaattttaattttcggatagtataggtttaggtttaagttttatatattgtttagtattatatattggggatttgagaagttattagtttttattatatgatttcgagggtttttattttttttttgttaagtgggtaaagataattttcggtttcgttagtttttttgtatgggcgagtacgtttgggtttttatagatttttttttgaaatttgaggtttggttttttttgaggtttatagatgagtttataaacgaaatttggtttagggtatttattattgttcggagtgaaggtcgaatttttgaaaggatattaaaaagagagagagagaaagagagatagatatagagagagagagagagagggagggagagagagagagagagagagagagagagagagagacgaaatagaagttacgaagaagttttttttagacgaatttttttttatttttgagtttaggagtaggtagggatttagggtattgtataatttttagagttttgtttcgtaattgttcgtgttcggcgagggtcgtgggtttcgagtcgcggtatttattttcgagacgttcgttcgtattttagaattcgggtttaaggatgttcgtggttcgcgagtttttttaggtttttttttagatcggatacgtagatttcggcgggtaaagatcggttttaaatttttttttttaggttttttcgggaggggtagtggtgaaagcgtttgcggagcggagggaggttttttttaattagaagtttatcggatacgggtttgattagagcgcgttgtttttgggtttagcgtttggtttggcgcggagagtgcgggggtaggggttaggggaggtaaagttgtcggttggaaggagtagcgtgtttaaaggttttttgtataggttttggagggagagaatcgagtggttaaggtagcgttttttttacggttagtttcggttcgggaggggagcgtaattttgatcgtgcgttaagaggcgagacgcgttttgtgtttttttttttcgtcggcggttgtagagaagtcgggaatcgtttggtttggtcgggtcgtgagagttgaggggtgaaatggatagtaggtttagttaggaaggtgtttagaaggttgaaaacgatgattgtagttgtattgtgattggggaaaatttgttttttaataaaatatttttttttgtgtgatcggaagagggagtttttggttttcgggcgtcgtaggttttcgtatttgattttagggtggtttgatgattttaggtttaattatgttttagggttttgcgagtttgcggggttgcgggattagtggattagtaggtaatttttttttttttttttttttttcgagacggagtttcgttttgtcgtttaggttgtagtgtagtggcgcgattttagtttattttaattttagtttttcgggtttaaacgatttttgtgttttagtttttcgagtagttgggattataggcgttcgttattaagttcggttaatttttttttttgtatttttagtagagatagggttttatcgtgttggttaggttggttttaaatttttgattttaggtgatttaatcgtttcgagttatcgcgttcggtttaagtaagtttttttttttttttttttaagttttgtatttagtttggggttatttaagtttttattttatatttgtttttataaattcgttaatttttatatatggattaagagtttggtgtttttttcgtaggttagaagaaatttattttaacggtggggttaagatttttggaaaaggagtagaaatattttagtatggtttgggtttaaattttatttttgttatttaattttatagaatttggatttttttatttaaaataaggggtttttttaggattagttggtgagttttttgtaaaggttttcgaggttattgttttaattaatatttagaatttagtgtttgattaagtaggcgattgatgtttgttaaattaatgtttataagattaggatgtaagatataatatttaagaatttaaaatatgaatatgtttgtgaagttttgggcggttgtgagtgggtattaataattgtttttgtttgtgtattatggttagattgttttagggatttagagacggttttgattttttttttttggggtttggttttggcgttttgatggttatttttatatttttgagagttgatgtttttgttttttatagtttaagttttgggttaggttttgtatttttggggaagtagtaggaattttggaaatttaaagaataaatttagaatttcgagggttatttttgtttattttaggatagtagtcggagcgttttttatatttaagttgtttaatgagttttaagggttgggtaagatggatttatttgtttttattgtaagataaaatttaaatttggagatggtgtttttaggttatatgatttgaatttagggttttttttttattgggttttttttttagggtggagaagaaggatatatttatttattagttttggtttttttttaattttttttttatggtagttacgtttgtatattatagaagaatttagatattttttagaagtgtaatgtttgttggttgtaaaatttatagttttattttttacgatatgtgataagattttaggtattagatttgttttgaaaagggttggataagggatttaaacgaagcgatagaatttaggttttaaaaattttttagaagtattaaaaagataatggcgtagtagtattttgtgttttaggggtatggattcgatggttttttaatcgtttttaaatagtatatatgtagatagtgttttcggatttattgttttttagttatagatgtttagatgggttgtcgagttttatatttaaagttttaagagggtggtgggtagcgtttttgtatttatggagtataattttaagtcggatttaatttttaggttgtttattttagttgtttttttatagacggggatattgagatttagaaattttttaaaagtaatattagtttgttaaataaaggtggcgcgatttgattaaagaatataagttttagcgattagtaagttgttttaacgttttttgagtataaaatattaattttattaattaaaagtatagagtggaggtaatttttgggtttgtttgcggtttttttataggatagtgattttagattttttcgaagaaaagggcggtttcgatttttttaaggtttcgcgggggtcgggtgtttttggttaggttaaggtaggagcggtttgaagacgcgcgtttagaaggcgcgggtgaaggcgggtaataagggtagagtttttttttcgagttttgggcgaaggtattttttgtaaaagatatattttgttttttacgtattttaaaaatatttcggtttttaggttttcgagtaattttgttttaggaaaagtattcgttattgtattagtaaagcgtttattaaattatcgaattaaatcgaattggtttaggtttttaatagcgtggaaatttattgaaaataaatgaagagggtaaattataggggtttcgtaggttcgggttcgcgtcgtttaggcgaaagagaggtgggcgggtatcggcgcgggatgagaaattaatttgatatttatcgtgtgtcgagttttttttttgtattttgattaagtatagcgaataattttgtttttgttttaattttaggttttgaagaaatattgttttagttgagtttcgcgtttataagatgaagaggcgttttagatgcgttgaaagaaaggttaaagttcgtgtttttttttattgtttgcggtagaatttggtttcgtatagtttggattcggataagttaagtttttttttatttttagaatttgcgtggtcgtcgtttgagcgaagtttagtgaagatttatttttgtattattatacgcgggagttatttacggatacgacgttgttttagaaagttatttagttattggaggtgtatgtgtttattttagttttttacgatatttaatgtgtatttaagtgtgtgttaatatcgtattataagggttggaggtgtttttggatattttagcgttgcggaggtagtatagtataggcgtttattttcgcgttggttttatttcgaatttagagtttagacgtttgaaaagcgttacgtttggtgataatttggcgtttttttaattaataaaattttttttaaggtagagttagatattgcgtcggttttttggttttattttcgtggggattagtagtttcggaatttttcggattttaaggggttttagacgttttttcggtttttgcgaatagttaggtttttagttttgtttggttttggaggatgtcgggggttagtgtttgcgtgtatttttatttttcggttttttttttagtcgtcgttttcgttatttttacggtttttgggaagtagttgggtaagagttgcggttaaaaggggtaggagaggggggtgttttagagcggagagtttttggcgttattgtttcgcgcgtagggggcgtttttcggtttatttattttgattgcgaatagcgggttggttttcgaggtagttgggtaggtagggcgcgttaggaaatattttggtttggtcggatgacgtttggttgggcggaggaggatcgaagggttcgtagcgataggtttcggttgtgttagtgaattggtcggaaaagtggatagtgaaggcgtttaggtattgtttttcgtgcggtttcgcgtcgttttagttcggtttttgtttgatgaaggagtgaggcggcggcggcgggggtggcggcggagtcggtggcggcgcggggtcgtttaacgattcgtaagtcgaagcgttcgggggcgtaaagtttagtatcggcgtttattgcgtcgcgtcgtttataggtagggtatagtcgtcgtcgttatttagggaggggacggcgggtagtagcgcgtttaggtttcgtacgtcggagtttatttgttgcggtttagattcggacgtttcgcggttttttcggttttggagacgtttagcgttggtttcggcggcgtttaatttggtttagatgtcgttcgggtttcggattttttgttgttttggttgttgtaggtatttaggttcggagcggagcgtgtgttgagacgtcggtttcgggatatacgtggaagtcgggttttgtagtaagaggaagtttaggatcgcggcgaggagacggcggggttcgggcgtttgggttgtcgtttcggttttgggtgggtgggtgggtgaatgagtaggtgggagggagggcgggaagtgggggagcggataggcggtcgggttgcggagagttttcgggtgtgggcgttgttttgaattttttattttagttgtttggttgtttttagttttttaaagtttaaataagaggggtcggcggcgcggggaagaggaggagttaggaggttcggtcgttttatttatttagtagtttaagttcggttaggtagcgcgcgttgttttttgggggcgttttcgtagttggggtgagggcgggttcgagggagcgtttttttcggagatatttttttttttaatttaatacgcgtttttagttggtcggtgtggtataattttttttttattttttttttttggttttcgttagtgtgggagtttcgttttattggagagttcgtttaggtaagtagtgagttcgggtagggtcgaatgcggtgggagtagagatggggttgttaatttaaaagagtggtttggagggaggggtaggtaggttttaagagggcgggaattttaggaaagcgtagaaagaatttagttaagttttaaagaagcgtatatttttgttttgtatttttgagtttggtttttgtttttagaattgtcgggtaggggagtggttatgattttggggttattggggaaagaggtggttttttgtgggttttagaggtcgggattgaaagcgaacgttttttagttgggtggtcgggagttgtattagttataagtcgggcgtatttcgatcggttagtagttgtttatttggtgaggtttgcgttaggcggaaggcggttgtcgtttatttaaaattggagttagtagtatttagtttttttttttagtgaggaatatttaatttttttacggttaagtcgggaaaatagcggttagtttaggagggaagaaaatttttgggtaaacgtttaaagtttgcgtatatttcggtcggagtattttggcgtttagtttggggaggaggggtgaaggggagggtttggatacgaagttcggtagggagcgggtaatttttggagttatttcgtcgagtattgtttgtggttttggtcgaggatattattttggttgtttagtgattgattaggaggcggaagttagttaaggggattaaggagtggagtagggagaatttttatcggtttacgggcgcgagttagtgttcgaatttttgggagttcgaagagtttcgttaaatttgatttttttcgtttagtttttgtttggtagttttcgcgttttagagtaggtgtttggggcgggtagggggtgttttggtttggtttttggattttttaaaggagttagtatttattgggaaataatttttaggtaaggagaagaatcgggggtcggagcggagcgtgttttagaggtgcgtataaaattttaggggcgttaggaggtagtagcgacggcgtagcgtgggacggttaggcgcgacgggagggaagtaatcggttgtagttcggttttttgtatttggttggttcgggttggggttgtaagttttttagttaaatttatgtgaagtaaagtagttgtagtttgataaagaatggcgttttaataaatgatatagtaattttttacgttttggtttttagtttgtattgtataaacgttgtcgttattaaattttggttgcggattcgaagtgtgtgcgggtttaggatttattcgaagggcgtattttttgggaatgcgtatttcgtaggcgtaggagattttgagggtaaagatgcggtatttgagtttttcgtttgttttttaggttatttttgttgtttgattttgcgtcgtttttatttagaagtttttaaaattattattaagaaaagaaagattttataagatattgtttttacgttttttgtttagtttttttttatacgatttatttttaaatttttcgcggggttcgcgcgtttggttttttgagtggagaaaggattttcgagataaaatttattgttagttgttttaagaattttttagatttttgtatttttttttttttttttcgtttattatttttatttggaagtcgttttttttaattaggatttaattgtgaggggcgaggagttttttatgaaaagtcggggatttttatttttaaacgaaaagattgagattgtttttttttttattatttttggtatttttagcggggggagaggaggttatttgaagggaggttggtttgaatgtgagtcgttgtgtttgtgaaatttaggtaaggtaaagatacgtaaatttttgttaatattttttaaaaataagtttttgtttcggggtgagggatgtaggggtggataggaggaaaggagagttaagtaaatgtagaattttttttttttttgttatttatttttttagaatttttgtgggggcggggaggggaagagtatcggtgcgaatttcggggtgttttttcgttcgatttggattttttcgattaaagaggtgggaggagttttttgtagtttgcggggttaagaagaaagtgttaagttgaggagtcgtagtcggaggattttagggattcgataggaagttttcgtacgattttaacggatttatatgttcggaagtttaggcgatattaagttagcgttggggaattgacgtatttttgtagtcgtagggcgttttatgtttttttgtttttttttttgttgtgggtaacgttttttgcgggagatttgaggttttttaagggggatatgttagttatattggttttggcgttttgagttaagtattaggatttatagtttagtacgaaggtaggtagtatttttattcgtcgcggacgataggcgtttttttgtattttttttagttcgcgaggttcgtttttcgcgaggttttagagaaaagtaggttgtggaaaattgggcgttttttttttttatttatttttttatttttgttagcgtcgagatttgtagtagaggtttttggtttgaattatcgattggtaaagaaagttgtagattaaatttttcgttttatagagaaggaaattgaggtttagatagtcgaaggagaggtagtttatggagcgtagcggtaaagagtaaggggttggtggttttagaatggaattttagttttgttaggtaattaatagttgtgtgattttagacgagtttcgtagtttttttgagttttagtttttttattggttaaacgggataatgggatattagcgtttattttatagagttgttttgaggattagataggagagtagtgtgggtttttgatttaattaattttatagtttttgttattattattgtttaaggataggaaataagttagtggtaacgtcgagttgaaattcgggttttttaacgtttagttggaggttttatttattatttttttatttttttagagttaatgggatgtagaggcgaggatagtttttggaaaattatgtggcgttgatatattggtaaagcgtaggtatttcggtttcgaaggtgtataattattgtaatatgaaaaaatcgaggttgggtaggagtagggtagtgaggattttttaatttttatttttatttcggcgttgtttattgtatttgatagagcgcggagttgggttgttatagtcgtaattttagggattagtgcgtacgtttgggtcgtttttcgggagttatttagcggtcgcggataattgaataaatattttaaagcgttgcggtcggttaagggcggggatagttatattgcgcgcggggttcgtaggtcgtaataaagagtggttcgatttcgttgttgtttgtcgcgggagaggaataagttttcgattagcgttttttttcggggttcgcgtttcgagttttacgcgtaagatagtttaatagttgtttttttttttttcgtcgattttaatttttcggaatttgtttattcggggttgtagggtaagtgtttaggatggtttttagtttcgcgttggcggtgaaaattttaacgttatttttttaattaaaaaaaggggggggtaagggaggggttttgtgataattatttttagttttttttgattattttaaaattaagtcgattttttttaattagtttttatttattgttttaatttttttcgttgattttatttgggagttcggaatcgttaggtattgtcgaatgcggtgtaaaattttttttttttttttagttcgtagtgtttggagtcgttggggttattcgtttgttttgatgttatcgcgagatggttttcgagtttttcgagagtttttagtgaaaggatttcgcggtattgtttttattattatatcgtaaatttttttaaattttggaattaattatatagaggatatgttttaatttgttttgtattaatgttatagtggggatggaggttaggtcgtggttagagtagatacgtaggtttatgaaattgatgaattgagagttgtttttagttttgagcgtattatttggaattttagtttgaggttataattagaatttttgattttagatttaattttgtaaataataggggaaaaaaatggggaaaagaaaaattacgagagagggaaaaaaaattattttgtatttgtaaaaaaaaaaaaaaaaaaaaaaaaaaaaaaaaagttatataattttaaaattttttcgttttagataat

SEQ ID NO: 89 - DNA, 6500 bp, Artificial Sequence
  chemically treated genomic DNA (Homo sapiens)
tgggtttgagttttttttttttttttggaaattttaatgtcgagaatagatttttattttttttgttttttgaatgtttttttttttttgtggtagtgatatagaacgtttagttgattatgaggaaagggttatgaggtaaaagaacgtatatggaagaaaatttttatttattaaaatagtaaaatattgttttttagtagtatagatgataaaaaatagtttttgataatatttgttgtttattgattttaataatagaaataaagtatgtttttaaaaatgattgataggatatgtgaaatataaaatattagtttaaaatgtgtttagaaaatggatttagttagttttaggtgagtaacggttttatttatagaggttgttcgtgggtaaaattggaagatgttagtttggaaggtgtgtggttatggtcggaaggtattattatgtaagtataaatattagtttcgttgtgttgtatgatatttaatgtgtttgttggattttttaataaagtaaagagaggtgttaagattggaagtgggaaaagaaaggttttgaatttgtttgggaagtgtacggggttcgtttgtgtttattaggggtgtgttacgggggttttttaggtttttttgtttttagtaattaagaggttaatttgaattagtttttttcggaagtagagtgttttttaggagaagtttttttgttttttttatgatttaagggtttttttgtttttttaaattattttttttaaataataaggcgttaaatttttttaataaaattttttgttttacgaatatttataaaacgtaaaaagtataagtttcggtggaggtaatatattgaaagttattttgttggaagtataattagaatttttttttgggtttttgtttttgttaggttgcgttggaattgtttgtaggtattatagttatgtttgtttttggtatgtaagtttttttatatagtttgggtaatatagtaaaattaggagattatagtaaaatttgtaaattaaaaaatatatatattcgggtatgatggtatgtgtttgtagttttagttatttaggaggttgaagtaggaggattttttgtgtttaggagtgtatggttttagtgatttgtgattgtgttatcgtgttttagttagggtgataaagtaagatgttgtttttaaaataaataaataaataaatgtatatataaatattttgatttttttcgtttaatgttgaaatttattatgtgaataaatattagtagtgtgttttaatttttaatattttaaatgtatatttgtatataggtattatgttattattattattagtatattttttattgtttttttttattttttgttatttttattttttagtaatttttattttttatttttagtttggtaagagattaagtttataagagtttttattaaaattttaaaaggttaattttttattttgtttttatttttatatggttttgtttttattagtatttaagattttatttacgattgaaagtagagtttttttttattttttagatgttttgtttatttttttgttggaagaaagttattaagtattgggttgggcgggtggatatatgttttgtcgagcgttatttttttttttgtttgtgtaagtgatattaggattttgtgattataggtagtttatgttttcgagggtatgtaaggttttttttttttgagaaagttcgtggaagtagaggatagtgtatgagtttttatggaaaattttttgttaaggattttagttatgattttttttatagaataggataattggagagtagttaaggagaaatatattttttatttagaaaatatttaaaattttgattggtaaaattaagtgtaataaagatgatattattttttgaatttatatattaattaatatttaatttagtttaaatgtttatttaaaattttttggtgatgtttaaataattgaataatttgatagtaaaaataaatttagatatataagtagataaaattttattttttaagtgattgtagaattatatattagtttatttttaaaaaatgaagattaaataaatatgttatagtgtggatattttataaattaaagttattatgagaatttaatatatgataaattagatttagtaatataagataaataatggagagaagaaaatatttatttaagaattagtattgggatatttaagtatgatatggagaaaagtgaaattagatttatatttttatataatataaaacgtagtgttagatattttaaaaatagttatttaaagtagaagaaaaaaattgatatatgtattagagtaaatagattgttatatttataaaagagatatatttatattagaatatgaaatagattattattatattatagatttgtttataatattaatagaatgatataataaatattaaaaggaaaataataaaatgaaaaatatttaatatatatttattgttttaaatatataaagaattgttgttaatataaatattttgtttttattttagtagtagttaaggaagattaaaagtttatataaaagggaaattttgttaaattgttaaattaaattgaattatatggaatatatatagttttatagtaattaagtaaatataaattaaaatttataaataatttataaataattaattttttatttttttaaagttagtgttggagaagagtgtgagagaaagtttatttatataattggtgggttggtatttttgaagagtaatttgttaatatgtagtaaaagttataaaattttaaaaattttaaatttatttattttatttgggaaatatatgagaagaaaaaatttagaggagaaaatgaagtttgtgtaagttttaatgtagtagtattagtttttttttttttttttttttttttttttttttttttttttttttttttttttttttttttttttttttttgagttagagtttttttttgttgtttaggttgaagtgtagtggagtgattttagattattatgatttttgtttttcgggggtttcgtgtttgagttttttgagttgttgggattttaggtatgagttattacgttaggttaatttttgtatttttagtagagatggggttttgttatgttggttaggttggtttcgaatttttgatttatgtaatttgttagttttagttttttaaaggtgtgagttattatattcggtttattttttattataaaaataagatataattttaatgtataattaaaaggaaaatggaggtataaaagtaagtgttttatattataggatgggatatagtatattattataattaaaaaggtttattgtgtggattatgttgatttatggaaattagtaagtgaagttttgataaagtggagtaagtgacgaatatattgaattgtaaggtttttggagatgggttacgtttatttatatttaatttatagggttatatttagtttttggtatatagtatatgtttagtaagagtttgttgaatgaatatatatatggtttatttgtttgtttttttcgagtttttgatttttgtttgttttgatttttggtagttttttattagtttttagtttttattttgtttatttggatttcggaattttagtttgttttatttttagataaacgtatgttttttgtggttttggaattttagtgatttttgttatattaaagtttttacgtttagggtgatacgtagttgtagtttcgtaaatttttaatatgatgttagtaaatattaaaaaaaaaaagtttataaaataatgaataaattttgttaaaggtataaatgaaaattagtaaatatgggaagataattgagtgaagagtttaaagttaaaaacgaattgtagttattttaggggaaggaatagttgtatttgaaaatttgtatggttatatgaattgtttaaaaaataagttaaggaaaattaaagtttagatttatatattttaagaaattaattgtaattaattttttgggattaaatagtatttttttaattttagttgttattaaaaagaggtaaatatagttaaggattggattttcggaaggttgatagtattgatttttaagaaggtatcggttgatagatagaatattttgttttaatatgtgttgaaatttcgttgagagtagagtggtatattgaattttttaggggtttataaaagaagtgttttgtgttttagagttatagagttttgtagaaataagtatgaatttatttagtggttttttgtattaggttttttttgtgggtattgagtgttagatatattaatatgtaatagtagaatgaatgattgaacgaacgattgaatgaaaagaaatgagaggtagtaggttgttagattttatgaggtaattatagtattaggtgattttagtatttatttgagaggattgttatttattttcgggagcgtacggttttaaagaggtttatatttaggtagtgagttttggtggggggcgtttttagatgtaagaaggaggaaatagttcgaaatttttgggtttgagcgcggttcgtgtaggtcggagggttaagaattttttatcggcggtagcggttcggtgtttgtttcggtttcgtttcggtttaaggttgtttgtgttataaatacgcggtttatatgtcgcggtgatacggtgttttttgggttcggcgggatagataatatgaatgtgttttttaaacgttttaagttgtagggatagttttcggtttagtttcgttttcggaagcgttttcgttttcgatgttttttgtagttgggaggagggggcgtttcgtatttgtttagttaatgcgcggcgcgagcgtcggtcgcgattcgttttttttcgcgagagttcggcggggatataagggggagttgcgggttaggcggcggttttttagcgtcgcgtagggtcggggattgcgcggcggtgttaggtcgggcgtgggcgagagtacgaacgggttgtttgcgggttgagagcgtcgagttgttattatgggtgattacgtttggagttttttaaaggattttttggtcgggggcgtcgtcgttgtcgtttttaagatcgcggtcgtttttatcgagagggttaaattgttgttgtaggtgaggatcgcgcggtgtaagaggcgggcgcgggcgcggcgggtcgggcggggcgcgcgatgcggcgcgagttgtagggcgcggggcgtcgcggaaaatttgcgttaggttttagggtcgggcgttcgttcgttcgttcgtttttcgttcgcgggggaagaaggtgttttttgcgtagagataggtttagcgttagtcgtagatttttggtgtcgggtggcgttcggcgttcgggtgtttatatatggaaatttattcggagtcggtttacgtgtgttagattttgcgttcgtgatagtacgggcgtgtatttaggttcggaggtatttagtgattgttagtatttttggtatcgttttatgcgtacgtatttttataataaaaatattaaaataattattatttaagaatttttttatcgtattttatgtataatgttgtatgtaggttgacgtttttatttttatgtaatttttgtgagagagttatttttttttattttatagatgaagttgaggttttgaaatattaagaaataattttcggaataaatttagattattttgtttttaaattttttttttttttatttggtcgttgaatggtttattattttttcgtgtttttttttatttgtttaaaaggttagggttttttaatgaggaagagtttaatttgggagttagaattattaataataaaatttttataaattgtttataacggtagtaaatttttaataattgattatttggattatttgtttgaaaattttggaggtttaatgtttagtggatttatttttttttttttattagagtatttagtagagatttttatttttagggtgattagagtgatattgagaaattgttattttttggttattatgtttattaaatttaaagttttttgaagtagggagtgttatttatttttgttttttagtaagttttttatatagtttttaaatttagggaaagtgaaataaataaatggttatagttttatataatttaattatttttttagtttatttggggtaatatttttttttttaaatattttaataattgaagtaatattggattattttggtttgttatttagtaattaatatggataatagtatttatttatacgtttttagtatttatttgatttttttattttttttttttttaaaaaaaaaatttaggaagtgtaaattttttttttttttttgttttttttttttttttttattttgtttgttttttgttatttatttttttttttattagg

SEQ ID NO: 90 - DNA, 6500 bp, Artificial Sequence
  chemically treated genomic DNA (Homo sapiens)
tttggtggaggggagggtgggtgatagaggataggtagggtagagagaagggaagaggataggagaaaaaaaaaggtttgtattttttagattttttttttgaagaaaaaaaggatgaggaaattaaatggatattgaggacgtgtaaatggatattgttatttatgttagttattggataataagttaaaataatttaatgttgttttaattattagggtatttgagggaaaaggtattgttttaaataaattgaaaaggtgattgaattatataaagttatagttatttatttattttattttttttaggtttgagaattgtatgaggggtttattgggggatagaaatgagtaatattttttgttttaaagggttttggatttaatagatatgatggttaaaaaatgataattttttagtgttattttgattattttggagatgaggatttttattagatgttttaatagaggaaggagaataaatttattaaatattaggtttttaaagtttttaagtagataatttaagtaattaattattaagggtttgttgtcgttgtgagtaatttgtgggggttttgttgttagtaattttgatttttaaattgggtttttttttattgaggggttttgattttttgggtaggtggaggaaaatacgagaggatgataaattatttagcgattaggtaggggaggaaaagatttggagataggatgatttgagtttatttcgaaaattgttttttaatattttaaaattttagttttatttgtaaaatggagaagaataatttttttatagaggttatataaagatgaaggcgttagtttatatatagtattgtgtatgagatacgataagggaatttttgggtgatgattattttgatgtttttattgtaaaggtgcgtgcgtataagacggtgttaaaaatattggtaattattaggtgttttcgggtttgagtgtacgttcgtgttgttacgggcgtaggatttggtatacgtaaatcggtttcgggtgggtttttatatatagatattcgaacgtcgggcgttattcgatattaggaatttgcgattgacgttggatttgtttttacgtagagggtatttttttttttcgcgggcggggggcgggcgggcgggcgggcgttcggttttggggtttggcgtagatttttcgcggcgtttcgcgttttgtagttcgcgtcgtatcgcgcgtttcgttcggttcgtcgcgttcgcgttcgttttttgtatcgcgcggtttttatttgtagtagtagtttgattttttcgatgggggcgatcgcggttttggagacggtagcggcgacgttttcggttaggaagttttttaggaagttttaagcgtgattatttatggtgatagttcgacgtttttagttcgtaggtagttcgttcgtgttttcgtttacgttcggtttggtatcgtcgcgtagttttcgattttgcgcgacgttagggggtcgtcgtttggttcgtagtttttttttatattttcgtcgggttttcgcgagaggaggcgggtcgcggtcggcgttcgcgtcgcgtattggttgggtaggtgcggggcgttttttttttttagttgtagagggtatcgggggcgaaggcgttttcgggagcgaggttgggtcgggggttgtttttgtaatttgggacgtttaaagggtatatttatgttatttgtttcgtcgagtttagggaatatcgtgttatcgcggtatgtgggtcgcgtatttatagtataggtagttttaggtcggggcgaagtcggggtagatatcgggtcgttgtcgtcggtggagagtttttgatttttcggtttgtacgggtcgcgtttaggtttagggatttcgagttgtttttttttttttgtatttaaaggcgttttttattagagtttattgtttggatatgggtttttttagagtcgtgcgttttcgagaataaatggtagtttttttaaatagatattaaggttatttgatgttgtgattgttttatagaatttgataatttgttgttttttatttttttttatttaatcgttcgtttagttatttattttgttattatatattgatgtgtttggtatttagtgtttataggaaagatttggtgtagggggttattaggtgaatttatatttgtttttgtaaaattttgtgattttaaaatataggatattttttttgtaagtttttaaagggtttaatgtattattttgtttttagcggaattttagtatatattagggtagaatgttttgtttgttagtcggtgtttttttgagggttagtgttgttagtttttcggagatttagtttttggttgtatttgtttttttttaatgatagttggggttgaggaaatgttatttaattttaggaaattaattgtaattaattttttaaaatatataaatttgagttttaattttttttagtttgttttttaggtagtttatgtaattatataggtttttaaatataattgtttttttttttagaatgattgtaattcgtttttaattttaaattttttatttaattatttttttatgtttgttaatttttatttgtatttttaataaagtttatttattgttttataaattttttttttttaatatttgttgatattatgttagaggtttacggagttgtagttgcgtgttattttgggcgtggagattttggtatagtagaagttattaaggttttagggttatagagggtatgcgtttatttaagagtggggtaggttagagtttcgaaatttaggtaagtagaatgaaagttagaaattagtggaaagttgttagaggttagagtagatagaagttaagaattcggaagagataaatagataaattatgtatgtgtttatttaatagatttttgttgagtatgtattgtgtattaagaattaggtgtagttttgtggattgaatataagtagacgtggtttatttttaaagattttatagtttagtgtattcgttatttgttttattttattaaaattttatttattgatttttatggattagtataatttatatagtaaatttttttaattataatagtgtattgtattttattttgtaatatagagtatttgtttttatatttttattttttttttaattgtgtattagaattgtgttttatttttatgatgaaaaataggtcgggtgtggtggtttatatttttgggaggttgaggttggtagattatataggttaggagttcgagattagtttggttaatatggtaaaattttatttttattaaaaatataaaaattagtttggcgtgatggtttatgtttggaattttagtagtttaggaggtttaggtacgagattttcgagaggtagaggttatggtgatttgagattattttattgtattttagtttgggtaatagagaaagattttgatttaaaaaaaaaaaaagaaagaaagaaagaaagaaaggaaggaaggaaggaaggaaggaaggaaggaaggaaaattaatattgttatattgaaatttatataaattttatttttttttttaagttttttttttttatatattttttaaatggaatggatagatttaagatttttaaagttttgtagtttttgttatatattgataaattgttttttagaaatattaatttattagttatatagatgggtttttttttatatttttttttaatattggttttaaaaaaatagagagttggttatttgtgagttatttatgagttttagtttgtatttatttaattattatgaagttgtatatattttatatgatttaatttaatttgatagtttgataaggttttttttttgtataaatttttaattttttttgattattgttggagtgaaagtagagtatttatattaataataattttttatatatttgggataataaatatgtgttgaatgttttttattttgttgttttttttttgatatttattatattattttattagtgttatgaatagatttatggtatgatgatgatttattttatgttttgatgtaaatgtattttttttatagatatagtagtttatttattttagtatatatattagttttttttttttattttgagtagttatttttaaaatgtttaatattacgttttatattgtatggaggtatgggtttaattttatttttttttatattatgtttgggtattttaatattaatttttaagtagatatttttttttttttattatttgttttatattattaagtttagtttgttatatattaagtttttataatagttttaatttatgaaatatttatattatgatatatttatttgatttttattttttaaaaataggttgatatatgattttataattatttaaaaaataaagttttatttgtttatgtgtttggatttatttttattattaagttgtttaattgtttaaatattattagaagattttaaatagatatttaaattaaattaaatattaattaatatatgaatttaggaagtagtattatttttgttatatttaattttattaattagagttttggatattttttaaatgggagatatatttttttttggttattttttagttattttgttttatagaaggagttatagttggaatttttgataagaggttttttatggaaatttatatattgttttttgtttttacggatttttttagaaaagagaggttttatatgttttcgggagtatgagttgtttgtggttataagattttggtattatttatataggtaggggagagaatggcgttcggtagaatatgtgtttattcgtttaatttagtatttagtggtttttttttagtaggagaatggataaggtatttaggagatgagaagaaattttatttttaatcgtggatgggattttagatgttggtgggaatagggttatgtagaaatgagagtagggtggaaagttagttttttggaattttagtggaagtttttatagatttagttttttattaaattgggaatagagaatggaagttgttaaagagtaagagtgataaggaataaagaaaaataataaaggatgtgttaatggtggtgataatataatgtttgtgtgtaagtgtatatttaaagtattaggaattagaatatattattagtgtttgtttatatggtaagttttagtattaagcgaagaggattaagatatttatatgtgtatttatttatttatttattttagagatagtattttgttttgttattttggttggagtacggtggtataattatagattattgaaattatgtatttttaggtataagggatttttttgttttagttttttgagtagttgaggttataggtatatattattatgttcggatatatatattttttaatttgtaggttttgttgtggttttttggttttgttatgttgtttaggttatgtggagaagtttatatgttaggaatagatatagttgtggtgtttataggtaattttaacgtagtttggtaaggataaggatttaagagggggttttggttgtatttttagtagagtgatttttagtgtgttgtttttatcggaatttgtattttttacgttttatgaatgttcgtgaaataaaaagttttgttagaaggatttggcgttttattatttaaaggaggtgatttgagggggtagaggagtttttgaattatagaaaagatagagggattttttttagaaggtattttgttttcgggggaaattgatttaggttggttttttggttgttggaggtagggaggtttgggggattttcgtagtatatttttgatagatataggcggatttcgtgtattttttagatagatttagaatttttttttttttatttttaattttagtatttttttttattttgttgaagagtttaataagtatattgagtattatataatataacgaagttaatgtttatgtttgtataataatgtttttcgattataattatatattttttaggttggtattttttagttttgtttacgggtaatttttgtgaataaaatcgttatttatttggagttgattgggtttattttttaaatatattttgaattagtgttttgtgttttatatattttattaattatttttaaaaatatgttttatttttattattaaaattagtaggtaataaatgttattagagattattttttattatttgtattattgaagaataatattttgttattttaatgaataagggtttttttttatatgcgtttttttattttatgattttttttttatagttagttagacgttttgtgttattgttataggaaaaagaaaatatttaggaagtagaggaagtaagagtttattttcggtattagaatttttaaaggaagagaaaaaatttaagttta

SEQ ID NO: 91 - DNA, 5546 bp, Artificial Sequence
  chemically treated genomic DNA (Homo sapiens)
aggaaggatatatagatatacgggagattgtggtaattggcggggaagggtggttttgggaaaagagtaaatgaaataggttttttggagggtttttgagtttaatagttaaaaggttttcgtttaattttcgagttttttttttgtattttatttgtagtgggtttttggtgttgatcgttaggatttggtatttgaagtagtagagtttatagttttaggagtttttttcgttgatttagcggatgaggtagggttgatgcgtgtagcgtattgagtcgtcgtagcggtaggggtttaagagttttttttggaggaagagtgaggaggggttttgttagttattattatttcgattttatttagtcgcgtttttcgatagggaaattttttttttaggttatttttttattttaaataatttaggttttttatttaagatagggtaagaggttaagtaaggttgtaatagaaaagaagttttttttggagattaagggaaattttttatattaaagagatgaaagatggaaagggatggggggattagaggggagaagggttgggttttttttttttttagaatttgggatgggtagtttttaagattttttaaaagaaaggtttttttttaggatttggagggaggggagtgttagagtttttgagttatgtttttttttttttattttattattgtaaagttattttatagatttggcgtaaattgggatgggttatggttttcggtttttacgtattaaaaaggggagaaatcgcggaggtgggagtgaagggtgtttttttttaattatggaattaatttttattatatagagatattttttggtattattttgggataattttgtttataaaattttaataaagaatattttttagaatgagatagaaagttgtagaatgggaagtgaaaaaaagtgttttacggggagaaatattgagttaagtaagggcgttggttgggtttttttttttaaggggggtatagaagtatttttttttttgtttatttgtaagagaataggtttttttagtttacggagattttggggcgagggaaataggagagaatagtagtttttgttaatgggtgagagggattttgcgtttttcggggagaaagttttatttttttttggggatttttgatttttcgatataaataagcgttttaggagttttttgttagtttttcggttttattttatttttatttcgtgttttggggttcgtttagtttttttaggcgtcgcgtttgttcgcggttttcgttgatattttaggtgcgcgtttttatttttcgcgttcggttaggtgtttaggtttgatttgtttcgggttttggaagtagattcggtattgaggggttcggagttcgttgtttaggttattgttgagcgatagggcgtttagcgcgttcgggggcggtagcggcggcgcgggcggcggtaggggttcggttcgcggttttttgtcgtcggttaggtttcgggttcgcggtttcgattcgtagtattttttttcgtcgtcgtcgtcgtttcgggtggagtagttagcgaagggcgtttagtcgtagtcgttttttcggttttttcggggttgcggttcggttcggggtcgtttttcgtttgttagtattagtagttttagttcgtttagaaatatgcggagtcgagatttgagtatcgttcggatatcgggggcggggggtagcgtgtaaggggggttcgttagcggcggggggaggggagaggataaggtcgggaagggggcgcgcgttagagagtcgagtcgggtcggggttttcggggtttgcgatagtcgtttattgttgttatcgtcggggtttcggtgtttgcggggtcgagcgggttggcggttcgggggcggcggggtgggcggttatggttagggtagggggcggggaggggggtttagggtgtcgtatttcgcgggtttgggtttggagcgggtcgggttttcggggttacgcgttcgggtttttttgcggcggggtcgttttttatcgtcgttttttcggttttagttttttttcggtttcgggattaggtttggttcggttcgtgcgttcggcggtggtaaatgtcggtttttttcggcggcggcggcggcggagattttttcggagtggcgggcgggcggggcgggcgtcggggagcgggtgaaggatggagggaggggcggggcggggagggggagaggagaaggggtcgcggttgcgtattttcgcgggtgtttcgtacgagtaggtgtttttaggggcgggggtaagtgtgggatttcgaggagggtggaggaaggggagtggttaaggaaggggagtgtgtatataagttgattaggtgtgtgtttgggagtgggggatgagcgggtgagtatggaaggtgagtggttaaatgacgtaggtgtattagggagggtgaggtttgtgtaaaatgggaatgtgtaaagaaagagttgtgtaagtgtcggaggtgtgagggaggtatatgggtaggggtgggatttagtaatatatttttatttaagggttgaaaagtgtgatcgatggggattgggaaagagaggtgtgtaaggaatggatcggaaagttttattattgggaaagagggtgtgtaaggaatggaatcggattgtttgagaaatagaagtttgtgattgtaatgtgtgaaggaggtgagggagggagtaggggaggtaggcgtgttaaagggatgggagtgttttttttggtatttttttgtttttatttttattatattgaagtgaataatatatatatttatttttttttttttatggagatttttttttgaggttaagttttatttttattatattttttttttttttatatttatattttttttttttttttttttgtaaagttgagggaaaagggattttaggggagtttattgggttaaatatattgggaaaaaatttaattagtgaaagagtaattaatagaagaagggaggggatagagtttgggatagattgttaaattaaggttttttaatagaaagtgatggagagatagtaatgtttttatgaagtatttaaatgttttggatggattaatgaatgaattagaaaaaggggttgggatttaagtagatagagaggacgttttttgttgtaaagatagtaagttgtgaaggttttatgtggaaggtgaggttgaagtggggaatgttggtgtgggaagggagtttgaaaaatttatagataattattttagttttttagaaggtttataaagtatttatttttagtaaggtagttaataaaatatttattttttgagttttttagttagtttagtttttgaggttttttttattagtgttttagttgtttttgttaggaggggtttagggttataagtattaggatggaaagaggaggtatttgtattaatatgtattttattttgttttaagttatggtttatatttattttttagtttgaatttttatatttttagttagatggttaaggaaaatagaagttagagtggaaggagtggtaaatagggtaataaaatggttttagattttagataaatttttataaatgagatattaatcgttttttttttttatttttatatttttaaagggttgggagataaagattttggagttaataaaataaagtaggagaaatttatttgtgtttatttaggtgtttgggtagaggttatttgggaataagtgtgttttggatagtgttaagtgttaagaaagcggtattagggaaaaagagggaagtataataattttaaatgagtagttataaggtttgtagaagggggtatgttatttttatttattgtggtggtttggagggtgtagggggtgtggtggtaatttttttgtatatgtgtaattttgtattcgttttatatatgatgtgataaataatattatatatatatatatatatatagaagtatatatgtatatatataaatattatataattatagaatttttttattggaaaaaaaaaaaaaatttaaaaggttaagtatttttgttttttgtttattaataatttttttgttagatggttttaggtttttgtattaatatttttagggaggtttggaagttggaaaagtgagaggattattttgttattgagtttgttggattattgtattaatttgtttttcgttattttttaatcgtagttttgtttttaaatgggtattgtttattttttattgtagaagattttattgttggttatatttttatagatagtcgtattattattttaaagggttagtgatagatattaaaaataaaataaaaatttatatatatattggaagtaagtatttagtaaaatgttgtagaattaatgaatgaaataatgatataaatgagagtatgtttttttatggtggagcgaaaaggtgatagtattatttttggtattttaatttttattttttttttaatgtagataggttgaaagatcggtagtgagattggagtttagtttttagatcggtagtgagataattttttagtcgggagttgggttttgggtggtttaggttgttatggtatcgtttcgggttttatttttttttgttttttttatcgttttttttttgtagcgggggttgtggtagttagttacgtgttcgtcgcgtagttatatttttgttttttagagtaatgttaagcggttacgtgtgatagtaatagattacgtggttgttatcgttttttcgtttttttatatttttcgttttttttttagtcgaagtattttttgttcgttttttagcgtatgggtggcggttacgtgtttagaacgttcggcgttcgtttcgtttttttagttttcgcgcgtttttttggtagttggttatatggtgagggtgggggtgagggggtttttttagtttgcggtttgtgtttatggtcgggttttttgcgtttagttgtttcggatcgagttcgggtgtatggggtcgtaggaatcggtttcggggtttcgataacgggtcgtttttatagtatttcgggttggcgtgaggtaagtgtagtttttttttaggaatgagaattagtgttcgttttttttatagttttttacgcgttcgtttcgcgagttggttatggaagggtcgtttaagggcgggaagtggggtttttgtggttatgggaaagtataattttagggattgaggtgtaggattttcgatgtaaggtatgtgttatgtgtgatttttgtgcggggcgcgattgttttaaaggaaaaagcgttttttattgtagggttttacgtggttggaggggttggtattgagttattgtgttatttttggggtcggttttaaggaagattgggagcgggggatgggatgttggtggtgttttttgcgttttttttttgggagtttttttgttgttgtaggtttatattattttaattttgtaagcgatttttggtgataggagtttgtgattgtagg

SEQ ID NO: 92 - DNA, 5546 bp, Artificial Sequence
  chemically treated genomic DNA (Homo sapiens)
tttataattatagatttttattattaaaagtcgtttatagagttaggatggtatgagtttgtagtaataaagggatttttaaaaaaaaagcgtaaagaatattattagtattttatttttcgtttttagttttttttggggtcggttttagagataatataatgatttaatattaatttttttagttacgtgaggttttgtaatagaaaacgtttttttttttgggataatcgcgtttcgtataaagattatatatgatatatgttttgtatcgaagattttatattttagtttttaaaattatatttttttatgattataaaggttttatttttcgtttttgagcgatttttttataattagttcgcgaaacgaacgcgtggaaagttgtgaggggggcgggtattggtttttatttttgggaagggattgtatttattttacgttagttcggggtgttgtgggggcggttcgttatcggggtttcggagtcggtttttacggttttatatattcgagttcggttcggagtagttggacgtagagggttcgattatagatataggtcgtaagttagagaggtttttttatttttatttttattatgtgattagttgttaaagaggcgcgcggaaattgggagggcggggcgaacgtcggacgttttgggtacgtgatcgttatttatgcgttgaggggcggataggaggtgtttcgattgggaggagggcgaagagtgtaagggggcggaggggcgatggtagttacgtgatttgttgttattatacgtgatcgtttgatattgttttgaggagtagaggtgtggttacgcggcgggtacgtgattggttgttataattttcgttgtagggggggagcggtgagggggataagagagggtggagttcgaggcggtgttatggtaatttaggttatttagagtttaattttcggttgaaggattgttttattatcggtttgaaggttgaattttagttttattatcggttttttagtttgtttgtattggggagggggtgggagttggggtattagaggtgatgttgttattttttcgttttattatgagaaaatatatttttatttgtgttattgttttatttattaattttataatattttattgagtgtttgtttttagtgtgtatgtgggtttttattttgtttttggtgtttgttattggttttttaaagtagtggtacgattatttataaagatgtagttaataatggggttttttataatagggagtaaataatgtttatttgagggtaaaattacgattaaaggatgacggaaggtagattaatatagtaatttaataggtttagtgataaggtaatttttttatttttttaatttttaaatttttttgggagtgttaatgtaaagatttgaggttatttggtagagaagttattgatgagtaggagataggaatatttgattttttaagttttttttttttttttagtaggaaggttttatgattatgtgatatttgtatgtgtgtatatatgtttttatgtatatatgtatgtatatgatattatttattatattatatataagacggatataggattgtatatgtgtaagaaagttattattatattttttgtattttttagattattataatgaatgaaaatgatatgtttttttttgtaaattttgtgattatttatttggagttattgtgtttttttttttttttttagtgtcgtttttttagtatttagtattgtttagaatatatttgtttttaaatggtttttgtttagatatttaggtagatataagtagattttttttattttgttttattggttttaaggtttttattttttagttttttgggggtatgggagtaaaggaggaaagcggttagtgttttatttgtgagaatttgtttaaaatttaaagttattttattattttatttgttattttttttattttaatttttgttttttttaattatttggttgagaatataagagtttaaattagaagatgaatataaattatgatttagagtaaaatagaatatatattaatatagatgttttttttttttattttgatatttgtagttttgggttttttttggtaagggtagttggaatattagtaagaaaaattttaaggattgaattgattaaggggtttaagaggtgaatgttttattggttattttgttaggggtgggtgttttgtaagttttttggaaggttaagataattgtttgtgagttttttaaattttttttttatattagtattttttattttagttttattttttatataagatttttatagtttattgtttttgtaatagaagacgttttttttgtttgtttgggttttagtttttttttttgatttatttattagtttatttaaaatatttgaatattttatgggaatattattgtttttttattattttttattgaggaattttaatttggtagtttgttttaggttttgttttttttttttttttgttaattatttttttattaattaaatttttttttagtatgtttgatttaatgagtttttttggaatttttttttttttagttttgtaaaggggaggagagggagaatgtaagtgtaagaaagaaaaaaatgtgatgggggtagaatttggttttagagggaagtttttataaaaggaaaggggtaagtgtgtgtattgtttattttagtgtagtggaggtgagggtaggagagtattaggaaagatatttttatttttttagtacgtttattttttttgtttttttttttattttttttatatattataattataggtttttgttttttagataattcgattttattttttatatatttttttttttagtgatgaagtttttcgatttattttttatatattttttttttttagtttttatcgattatattttttagtttttgggtaaaggtatattgttgagttttatttttgtttatgtattttttttatattttcgatatttgtatagttttttttttgtatatttttattttgtataagttttattttttttggtatatttgcgttatttaattatttattttttatgtttattcgtttattttttatttttagatatatatttagttaatttgtgtgtatattttttttttttggttatttttttttttttatttttttcgggattttatatttgttttcgtttttggggatatttgttcgtgcggggtattcgcggggatgcgtagtcgcggttttttttttttttttttttttcgtttcgtttttttttttattttttattcgtttttcggcgttcgtttcgttcgttcgttatttcgggggggttttcgtcgtcgtcgtcgtcggaaggagtcgatatttgttatcgtcgagcgtacgggtcgagttaagtttgatttcggagtcggagggggattgggatcgagagaacggcgatggggggcggtttcgtcgtaggaggattcgggcgcgtaatttcgggggttcggttcgttttagatttagattcgcggggtgcggtattttgagttttttttttcgttttttgttttggttatggtcgtttatttcgtcgttttcgggtcgttagttcgttcggtttcgtaagtatcggagtttcggcggtggtagtagtgaacggttgtcgtaggtttcgaagatttcggttcggttcggttttttagcgcgcgtttttttttcggttttgttttttttttttttttcgtcgttagcgagttttttttgtacgttgtttttcgttttcggtgttcggacgatgtttaagtttcggtttcgtatgtttttgaacgagttgaagttgttggtgttgataggcggggggcggtttcgggtcgagtcgtaatttcgggggggtcggggaggcggttgcggttgggcgtttttcgttggttgttttattcgggacggcgacggcgacgaggaggagtattacgggtcggagtcgcgggttcggggtttggtcggcgataaggagtcgcgggtcggatttttgtcgtcgttcgcgtcgtcgttgtcgttttcgggcgcgttggacgttttgtcgtttagtagtagtttggatagcggatttcgaattttttagtgtcggatttgtttttagggttcggagtaggttaggtttgggtatttggtcgggcgcggagggtggaggcgcgtatttggggtgttagcggagatcgcgagtaggcgcggcgtttaaggaggttgggcgggttttaggatacggagtgggaatggggtgaggtcgaggggttggtaggggatttttggagcgtttgtttgtgtcggagggttaagggtttttaggaaggggtggggtttttttttcggagagcgtaaaattttttttatttattaatagggattgttgtttttttttatttttttcgttttagggttttcgtaagttaaggggatttgtttttttgtaggtgggtagaaaggagagtgtttttgtgttttttttgaagggaggggtttagttagcgtttttgtttagtttagtattttttttcgtggggtatttttttttattttttattttgtaattttttattttattttaaagagtattttttgttaaaattttatgggtaaagttgttttagaatagtgttagggggtgtttttgtgtagtgagaattgattttatgattaaagggaaatattttttatttttattttcgcgattttttttttttttagtacgtggaaatcgaggattataatttattttagtttgcgttagatttgtgaagtaattttataatgatggggtgggggaaggaaagtatggtttagaagttttaatatttttttttttttagattttaagaggaagttttttttttgagaagttttaaagattatttattttaaattttaggaaaagagaagatttagttttttttttttttaatttttttatttttttttattttttatttttttggtatgggaagttttttttgatttttaagggaagttttttttttgttgtagttttatttagttttttgttttgttttgggtgaaaggtttgagttatttaaggtgggaaagtgatttgaagaggaggtttttttgtcggggagcgcggttgagtggggtcggggtggtgatggttgatagggtttttttttattttttttttagggggagtttttaagtttttgtcgttgcgacggtttagtgcgttgtacgtattagttttgttttattcgttggattagcgagaggggtttttggagttgtgagttttgttattttaagtattaggttttggcgattagtattaagaatttattgtaggtgaggtgtaaggagaggattcggagattgggcgaggattttttagttattggatttagggattttttaggaagtttattttatttattttttttttaaagttattttttttcgttagttattatagtttttcgtgtgtttgtatatttttttt

SEQ ID NO: 93 - DNA, 5976 bp, Artificial Sequence
  chemically treated genomic DNA (Homo sapiens)
agaggggtattttttattttaatttgaattttatgattgtattttttgttaggagatgaaagggataagattgtttgaaggattaatttttagtttttaggtaggttagtggttaaaatatttaggaagtgaaagtttgttttttgttataaggaaatttggagtttgtgattttattatgcggggtttgttatttgttaggtgatagggttttttatttatttgcggtgatttgaagggtaaggtttttggttaaatattttttttttttagtgatgtttgaaattttattgttagcgttggattttagtaagattttagagaaagtttaatttttggagtttgggttttttttagttgagatgttaggaaagtaatgggttttattatttgtacggataggtttgtgtatagttttaggggatttagggattttattagagtttatttatagatattaggttaaaagttttggatagtatttataatttttttgaaagaagaaaagtttttttttagagttttttttaaagtgtaaatggttttgggaggttcgaaatgatgagttggtcggtatgaaagaattttttttagtagatgtaagagataatttgaggagttttagtggcgggggtgggggaaggagagtttgggggaggggaggttttaggtagtttataattttttttagaattggaaagggaatgtattgggttaagagggttaattatttatttttgtagagtgtttataagaattttatgaattaagtgttattaatatttttattttatagatgaggaaattaagatggtggagataaaatgatttatgttttttaattaatggtagagttagaagtgaatttaggttggagtgaagtggttttagtgtttaaatgatttttttattttagtttttagagtagttgggattataggtatgtattgttatgtttagttaatttaaaataatatttgttggggagatggggttttattatgttgtttagattggttttaaatttttgggtttaagtaatttttttattttttaattagttttttaaagtgttgcgattatagttgtgagttattaggtttgtttaggtatttttgtttgatataagagaaaatagagggtaggtatagtggtttatatttgtaattttagtattttgggaggttgaggtaggtggattatttgaggttaggagtttgagattagtttggttaatatggcgaaatttcgtttttattaaaatataaaaattagttagatatggtgacgtgtgtttgtaattatagttatttaggaggttgaggtataagaattttttgaatttgggaggtagagagtgtagtgagtcgagatcgcgttattgtattttagtcggggtaatagagtaagattttgttattaaataaataaataggaaatagagaagtaatttagtgtgttgcgaaagttatatagtatttgttttttataaggagtttttttgtgttttcgttttattttggatatttgatttattgtttttggagtttggagaaggatttgtcgagaagtttgaagaatgtattaggtttgatttgattttgttgtttttaattgttttttaaaattttttttattgaattattagagtgtaatggaagagtcgatgagagtcgttgtagagttacgaggttaaggtttgttgggtagaagaaagtaaagttttaaaggtttttagggtttagcgatggtataaaatatgtatttttatataattgagaggaaaaaaataagtagatagtatagttttatgggggaaacgtttttttttgtatttttattattttgtttaaggtacgattttagtgggaaaggaaatatcggagttttttttttttgagttttttggtgggttaagagtagagggagttaaaatacgatatttaaaagatttgattggaaatttattaaaattgaggggataggttgttggggggggcggtgttgggttgtttagaaatcgtttgtatttgagaaattatttgatggatttagaggtatttttagttttgggtgaaatattttaaatatggttttttttaggaggaagcgaaataggggttgggttttttgaaagagtaatttttattttaaatatttattgagtagttgttatgatgagttaagaattttgtttagcgattgtttttgtattagtttatgttaatttatttatataaaggagaatattgatttttttaaggttatagggttagtgagtggttgattttatttaatgttgtgtagttttaattatgtttgaaggataaagggaaaggaggtgtttttgtcggggtagataagttatttagacgtggttggttatagggagttagatagggaagttgtttaatttaatatttgtttgtttattttgtttttgttttttgatggaggacggcgggtgttggagggttattggtttaggatttgagatttttggtttttatttattttatttttgattttaaaattattttattggggatagaattttttggagaaggtgatggtggttatggtgtggttgtggtattaaaagttttattttgggggttagaagattttgggttttggtttttggttttgatattgatttgtttatgtgatattgaataagttatttgtaaattataggtttgggtgaattttaaaggttttttttaggttaatattaaaaaatagattgaaaattgtagttttagttggaagattgggattatatgagatgaagttgattgttagaagaaaggttttggaattagagaggttggttttagttttgcgttattttttattggttttaatttttttaagttttagttgtttatttattatatgggaataataatatagtttttgggttgttttgaaatgagtttaaatgagttggttagtggttgggtacggtggtttatgtttgtaattttagtattttgggaggttgaggtaggtggattatttgaggataggagtttaagattagtttggttaatatgatgaaattttgtttttattaaaaatataaaaattagttagtcgtggtggcgtatgtttgtaattttagttatttaggaggttgatagaggagaatcgtttgaatttaagaggcgaaggttgtagtgagttaagaatatattattgtattttagtttgggcgatagagtaggatttcgttttaaaaaaaaaagagttggttagtgttaaatgtttagtatagagattggtatagtaatttttaatgtttagtatttattgttattattttttttttttttttttttttgagatagagttttgttttgtcgtttaggttggagtatagtggcgcgatttcggtttattgtaagttttattttttaggtttatgttatttttttgttttagtttttcgagtagttgggattataggcgtttattattacgtttggttaattttttgtatttttagtagagacggggttttattgcgttagttaggatggttttaattttttgatttcgtgatttgttcgtttcggttttttaaagtgttgggattataggcgtgagttattatgtttggttttattgttattatttttattttttatttttgtatagagtatttatggtttaagaaatatttgttattttaattgtatgggagttttataatagtatagggagatatttttgattattatttttattaggagggtggagaaattgaggttttgggaggtggttttgatttagggaattaatttgttgatttattaatttatgaagttttatagttaaaaaagattagattaaaaaatgagaatttagtaaaggggttgaggtaggaggatcgtttgagtttagaaatttgagattagtttcggtaatatagtgagattttttttttagaaaaattttttaaaaaattaggtcgttcgaggtagagtgtagtggtttacgtttgtaatttaatattttaggaggttgaagagggtggattatttgaggttaggagttttagattagtttggttaatatggtgaaatttcgtttgtattaaaaatataaaattagtcggtgtggtggtatacgtttgtagttttagttatttaataggttgagataggagagttttttgaattcggtaggcggaggttgtagtgagtcgagatcgtgttattgtattttagtttgggtaagatagagcgagatttcgttttaaaaaatataaataaaataaataaataaaaaattaggttgttagtttagtggtttatggtttatatttgaaattttagtattttgggaggttaaggtaggaggatcgttttagtttaggagttcgagattaggttgggtaatatagggagatatagcgtttttattgtttttgttcgtttcgatttgtttttttataaaaaggtaaaagaaaaaaaaattagtttggcgtggtggtgtgtatttgtatttttagttattagagaggttggggttagaggatcgtttgagtttaggagttcgaggttgtagtgagttgtgatcgtattattgtattttagtttgggtgaaagagtgagattttatttttaaaacgaataaataaaaaattttaaaaaataaaagaatttagttaagtgtaaaagttttttttgattttaggttttagtgagttatcggcggggttgggattcgaatttagtggaattagaatcgtgtaggttttataatttatttagattttagtaattttaggttagagggttatcgcgtttatgcgaggtcgggtgggcgggtcgttagtttcgttttggggaggggttcgcgttgttgattggttgtggtcggtaggtgaatttttagttaattagcggtacggggggcggtgttttcggggtttatttggttgtagttacgtatttttttttagtggcgtcggaattgtaaagtatttgtgagtttgcggaagttagtttagattttagttcgttttagttcggttcgattcgatcgtattcggcgtttgttttcgttcggcgttttcggttagttatgggtttttggagtcgtagtttttcggcgttgttgttgttgttgtaggtatttcggattttttgatttgcgagggacgtattcgggtcgtaagtttcgcgttttagttttgcgtttttttttttttcgtcgttatcgtttttttttttttaagaaagttcgggttttgaggagcggagcggtttggaagtttcgcgcgtttcggattttttagtgatgggagtggggggtgggtggtgaggggcgagcgcggtttttttgttttttttagcgtagatcgaggcgggggcgtttggtcgcggagttcgcggggtgggttcgcgcgggcggtgggggcgtgaagcggggtgtagggggtggggtgtggagaaggggtgttttggtgtaagtcgagggggagttaggagtcgtggggacgattttcgagggaaggagaggggtattcgtagaaataaaggtatttgttatgttaagaaaggtcgtaaataggagtgagggtttcggggataagaaagtgaggtcggaggaggtgggagcgtttttcgttttgaggagtggtgtattttcggtttaaggaaagtggggtattggagaataaagatatttttaataaaatgagaaaggagattgaaagggaacggtgggttaggttttgagggggtgattcggcggttttttttcgggagtttttgggggttcggcggtcgtaggtttcggggtgggggagggtgacgtcgttgttcgttcgtttcggggttgcgggttggggtttttttttaatttcgacgtcgggagcgagggaggggcggcgttgttggtttcggtgagtaggagggaatttttcgagttattcggttttatttattttttttttattttagg

SEQ ID NO: 94 - DNA, 5976 bp, Artificial Sequence
  chemically treated genomic DNA (Homo sapiens)
tttggggtgggggaaaggtagatggaatcgggtgattcggagggtttttttttgtttatcgaaattaatagcgtcgtttttttttcgttttcggcgtcgggattgggggaggattttagttcgtagtttcgggacgggcgggtagcgacgttatttttttttatttcgaaatttacggtcgtcgagtttttaggaattttcgggagggggtcgtcgagttatttttttaagatttagtttatcgtttttttttagtttttttttttattttattggagatgtttttattttttagtattttattttttttagatcgggaatgtattattttttagagcgaggggcgtttttatttttttcgattttatttttttattttcgggatttttatttttatttacgattttttttggtatggtaggtgtttttatttttacggatgtttttttttttttttcgaagatcgtttttacgatttttggttttttttcgatttgtattagggtattttttttttatattttattttttatatttcgttttacgtttttatcgttcgcgcgagtttatttcgcggatttcgcggttagacgttttcgtttcggtttgcgttggagggggtaggaaagtcgcgttcgttttttattatttattttttatttttattattggggggttcggagcgcgcgaggtttttaggtcgtttcgttttttaggattcgaatttttttggaagaagggaagcggtgacgacgggagaggaaggggcgtagggttggggcgcggagtttgcggttcgaatgcgtttttcgtaagttaggggattcggggtatttgtagtagtagtagtagcgtcgagaggttgcggttttaagggtttatggttggtcggggacgtcgagcgagggtaggcgtcgggtgcggtcgggtcgggtcgggttggagcgggttggagtttgaattgattttcgtaagtttataggtgttttgtagtttcgacgttattgagagggggtgcgtggttgtagttaggtgagtttcggaggtatcgtttttcgtatcgttgattggttgagggtttatttgtcggttatagttaattagtagcgcggatttttttttagggcggagttgacggttcgtttattcggtttcgtatagacgcggtgattttttagtttggagttgttagggtttaggtgggttatgggatttgtacggttttgattttattgggttcgaattttagtttcgtcggtggtttattaagatttgggattagaaagggtttttatatttggttgagtttttttgttttttgggattttttgtttgttcgttttggagatggggttttatttttttatttaagttggagtgtagtggtgcgattatagtttattgtagtttcgaatttttgggtttaagcggttttttggttttagtttttttagtagttgggagtataggtgtatattattacgttaggttaattttttttttttttgtttttttgtagagagataagtcggggcggataggggtagtgggggcgttgtgtttttttgtattgtttagtttggtttcgaatttttgggttgaagcgatttttttgttttggttttttaaagtgttaggattttaggtgtgagttatgagttattgagttagtagtttaattttttgtttgtttgttttgtttgtattttttgagacggagtttcgttttgttttgtttaggttggagtgtagtggtacgatttcggtttattgtaattttcgtttgtcgggtttaagagatttttttgttttagtttattgagtagttgggattataggcgtgtgttattatatcggttaattttgtatttttagtatagacggggttttattatgttggttaggttggtttggaatttttgattttaggtgatttattttttttagttttttgaagtgttggattataggcgtgagttattgtattttgtttcgagcggtttaattttttaaaaaatttttttagagaggggattttattatgttgtcgaggttgattttaaatttttgaatttaggcgatttttttgttttagtttttttattgagtttttattttttaatttagttttttttaattgtagagttttatgggttagtgagttagtaaattgattttttaggttaggattattttttaaagttttagtttttttatttttttaatgggaataatgattagaaatgtttttttatgttgttgtgggatttttatataattaaaatgataaatgttttttgagttataaatgttttgtatagaagtgaggggtaaaaatagtaataatagggttaggtatggtggtttacgtttgtaattttagtattttgggaggtcgaggcgggtagattacgaggttaggagattgagattattttggttaacgtagtgaaatttcgtttttattaaaaatataaaaaattagttaggcgtggtggtgggcgtttgtagttttagttattcgggaggttgaggtaggagaatggtatgaatttgggaggtggagtttgtagtgagtcgagatcgcgttattgtattttagtttgggcgatagagtaagattttgttttaaaaaaaaaaaaaaaaaaaaaatagtaataataggtgttggatattgaagattattgtgttagtttttgtgttaagtatttgatattgattagtttttttttttttgagacggagttttgttttgtcgtttaggttggagtgtaatggtgtgtttttggtttattgtaattttcgttttttgggtttaagcggtttttttttattagttttttgagtagttgggattataggtatgcgttattacgattggttaatttttgtatttttagtagagatagggttttattatgttggttaggttggttttgaatttttgtttttagatgatttatttgttttagttttttaaagtgttgggattataggtatgagttatcgtgtttagttattgattagtttatttaagtttattttaaaataatttaagagttgtattattatttttatatgatagatgggtaattgaagtttagagagattgaggttaatgagaggtggcgtaggattggaattaatttttttgattttagggttttttttttaataattagttttattttatgtggttttagttttttagttggagttgtagtttttagtttgttttttgatgttgatttggaagagatttttagagtttatttaaatttatgatttgtaaataatttgtttaatgttatataggtaggttaatgttaaagttaaagattaaaatttaggattttttgatttttagagtggggtttttaatgttatagttatattatggttattattattttttttagagaattttgtttttagtgaaataattttaggattaaaaatagaatagataggggttaaaggttttaggttttgggttagtggttttttagtattcgtcgttttttattaaaagataaaaatagaatagataggtaaatgttaggttagataatttttttgtttgattttttgtggttagttacgtttgggtggtttgtttatttcgataagggtattttttttttttttattttttaagtatggttagaattatatagtattaagtggagttagttatttattagttttgtgattttggggaagttagtgtttttttttgtataagtgaattggtatgagttaatataaaaataatcgttaagtagagtttttggtttattatagtaattgtttaataaatatttggagtaggggttatttttttaaaaggtttagtttttatttcgtttttttttggggaaagttatgtttggaatattttatttagagttaaaggtgtttttgagtttattaagtaattttttaaatgtagacgatttttgggtagtttagtatcgttttttttaataatttgtttttttaattttaatgagtttttaattaggttttttggatgtcgtattttggttttttttgtttttaatttattaggaggtttagagggagaaggtttcggtatttttttttttattaggatcgtgttttgaataagataatggaaatatagaaagaggcgttttttttatggggttgtattgtttgtttatttttttttttttagttatgtaaaaatatatattttatattatcgttgggttttgggagtttttagggttttatttttttttatttagtaagttttggtttcgtaattttgtagcgatttttatcgatttttttattatattttgataatttaataaaaaggattttagaaaataattaggggtagtaaagttaggttaggtttgatgtattttttagatttttcggtaagtttttttttaagttttaaagatagtagattaggtgtttagggtgaggcgggaatatagaggggttttttgtggaagataggtgttgtgtgattttcgtaatatattgaattgtttttttgttttttatttatttatttagtgataaggttttgttttgttgtttcggttggagtgtaatggcgcgatttcggtttattgtattttttgttttttaggtttaagagatttttgtgttttagttttttgagtagttgtgattatagatatacgttattatgtttggttaatttttgtattttagtagagacgggatttcgttatgttggttaggttggttttaaatttttgattttaagtgatttatttattttagttttttaaagtgttgggattataggtgtgagttattgtgtttgttttttgtttttttttgtattaaatagggatatttaagtaggtttggtggtttataattgtaatcgtagtattttgggaggttagttgggaggtgagaagattatttgagtttaggagtttgagattagtttgggtaatatggtgaaattttatttttttaataaatattattttgaattagttggatatggtagtgtatgtttgtagttttagttattttggaggttgaggtaggaggattatttgagtattggagttattttattttagtttggatttatttttggttttgttattagttgagaagtataagttattttatttttattattttggtttttttatttgtaaaatgggaatgttgatagtatttaatttataaggtttttgtaaatattttgtaaaggtgagtgattagtttttttggtttaatatattttttttttagttttaggaaaaattgtgagttgtttggagtttttttttttttaggtttttttttttttattttcgttattaaagttttttaggttattttttgtatttattggagaaaatttttttatgtcggttagtttattatttcgaattttttagggttatttgtattttaaagagggttttagagaaagatttttttttttttaaaggagttgtaaatgttgtttagggtttttaatttggtgtttgtggatgggttttggtggggtttttgaattttttgagattgtatataaatttgttcgtgtaggtgataaggtttattgtttttttaatattttaattggggaaaatttaaattttaggagttgagttttttttgagattttgttgagatttagcgttaatagtggaattttaggtattattggggaaaagaaatgtttggttagaggttttgttttttagattatcgtagatagataagagattttgttatttggtagataatagatttcgtatgatgggattatagattttaggtttttttatggtagaggatagatttttattttttgggtgttttggttattggtttgtttggaggttaaagattaattttttaggtagttttgttttttttattttttggtaaggggtgtagttatagggtttagattggggtgggaggtgttttttt

SEQ ID NO: 95 - DNA, 8666 bp, Artificial Sequence
  chemically treated genomic DNA (Homo sapiens)
ttgtagggttttttttagtttaaagaaagtaattaggtgtttttattgtgttatgatttttatttttagttgggttttttagtttggttttaaagaataaaataaaaggtttttttgtttgagttttatttaatttattttttttatttataagaggtattttaaatttttacgatttttaaattttttaatcgattattttatttttattttgtaaataagttaatttttttatttatagaaggaagtgttttaatttttttttcgttttgatttttttttttttttaaatttatgtattttttgtgataaaatttataattatcgttgtattttgagttttatttttttattatttttgagggattttaagtttttaaaaatattttattttgtttgtgtatttaattttttttttatttttttttaatttttttttttttttatttggtatttgtttttttaggtatatgtgtgtttaggttttttttattttttatttgttttattttatggtatagggttttgaattattataattaagttatgaaagagtagttaacgtagtgtttttatttttttgttattttattattttagttttttttttggttttttgaggagttttttataggttggtttttaggaataagtttaaatgaattatttttagtttttttaaatttttatgtttttgtatatttttttatttttgtttagaatattttttttttttttttttatttttaaatttttatattattttttaagattgggattagtttttagtattcggaagtttttgtttattagagataaatgagaatgagtttggttatttttttatttttttgtattattttgtgttttattttgtttttttaagagtattatatgttttatttaatttttaaataattgtttgaggtaagtatagttattattttaattatgtaaatgagaaaatagaggtttagatatgttgagtaattttgataaaagttaaagaattaataagtggaatagttgaggtttgaattttggtagtttgattgtagagatattatgtttgatttatttttttttgtttttattttatgtttgtttttagtttttgagtttgttgaatgaatgaataggtggtagtttttttttgttataagattgattagaattaagataggtttaaattttacgtgtagaatttttaaaattgtaaaggtagtgtaaatttaaaaaaagaatggtatttttaggaaagaggaaaagtaagtgtgagaataataataataataattaataaattttagtaaatttagtaaatgtagtaaatttttatattaaaagtttttggatatatattattatattttatggttatatgaaatatattataattttattttgtatataggaaatttgagattggtataaggagtatagagatttaggattttatatttttatttttttaggattttgtattttaggtcgatatgtatgagtaaattgggagtataatgggttttttaatagaaaaattaggaaagtttttttattattattaattatttatataatatttttttaattttattattatttatattttaagttttagagtatatgtgtataatgtgtaggtttgttatatatgtatatatgtgttatgttggtgtgttgtatttattaatttattatttagtattaggtatattttttaatgttatttttttttttttttttttatataagatttataatggataatggattttaatttttagagtaaaatggttttatttaaggatgttataatttttttagagttttattgtaagatatgagatatatatatttaaaatttgtttttggtatttttaaagtagttaatttttatatttgtttataatgtatttaaatgttgtttttatatggttgtattttttattttttttattaatagttatatatattttttataagagttgaaagagtttttgatgtaggaatttatggtagagttttagagaaatttttgaatttattgaaagttttatttagaaatatatgtgtaagtgaatatattttttttaaaaaaaattattatttatttttttttttgagaagaaggtatttattttaatagatttttgaaggagtttattttttttatttttttatttttattaagaattattgtaggtcgggtacgatggtttatgtttgtaattttagtattttgggaggttaaggtgggtggattatttgaggttaggagttcgagataagtttagttaatatagtgaaatttcgtttttattaataatataaaaattagttgggtatggtagtatgtgtttgtaattttagttattcgggaggttgaggtaggagaattgttcgaattcgggaggcggaggttgtagtgaatcgagagagatcgtgcggtgttattttattttagtttgggtaatagagcgaaattttattttaaaaaaatatataaaataaataaataaaaagaaagaattattgtattagtgatggaaatgtgtttttttttttttattttggtaattatttttttttttttttattataaaatattttaaattaaattaaaataattttatttatcgatagtttgaattttttttattattgttatatagttaattgagaggtatttcgaggaaaatataaatggtatagtaatgtattgtagattttaataatatatttgatattttaaattgtttttattggttttattttaaaaattatatgttttaaaattaagtagatattaaaagtataagatatattgggtttataaggtttaagttaattagggattgaaatataatttttaaatagagttggattatttagtaggtagattaagtatgtgtttaaggtattagtaaagtttgagtaatttattttttaaaacgtagtatatgtttttgataagtttaaaaagtagtagttataggaaaaattagaatttttatttttttgcgtttgttatattttttagtgttgtttaatttttttttgtaagtgagggtggtggagggtgtttataatttttttagggagtaagttttttttggttttttttttttttttttttttttttttttttgagattaagtttcgtttttgttttttaggttggagtgtaatggcgcgatttcggtttattgtaattttcgtttttttttgggtttaagcgatttttttatattagttttcgagtagttgggattataggtatgcgttattaagtttcgttaattttgtattttttagtagagatagggtttcgttatgttggttaggtttgtttcgaatttttggttttaggtgattcgtttgtttcggttttttagaatgttgggattatagacgtgagttatcgtattcggattttttttttatgtaatagtgataattttatttaaagtatttttttttttttttgagtcggagttttattttgttatttaggttggagggtggtggcgcgatttcggtttattgtaatttttgtttttcgggtttaagcgatttttttgttttagttttttgagtagttggaattatatacgtgcgttattatggttagttaatttttgtatttttagtagagacggggtgttattattttggttaagttggtttcgaatttttgattttaggtgatttgttcgtttcggttttttaaagtgttgggattataggtgtgagttatcgcgttttgttttaaagtattttttttttatgttttaaaataagattgtaagttagtttttaaagcggataatttaagagttaataggtattagtttaggatgtgtggtattgtttttaaggtttatatgtattaatatattatttaaatttataataatttttataaagtagggggtatttatatttttttttttttttataattacgaaaaatgtaaggtatttttagtaggaaagagaaatgtgagaagtgtgaaggagataggatagtatttgaagttggtttttggattattgtgtaattttgtttttagaatattgagtattttttttggtttaggaattatgattttgagaatggagttcgtttttttaatgattttttttttatttttttatttgtttataggtagaattttttttcgttcgtattaaataaattttatttttttagagtttgtttttatattaggtaatgtatacgtttgagaaatttttgttttagatagtcgttttatacgtaggaggggaaggggaggggaaggagagagtagttcgattttttaaaaggaattttttgaattagggtttttgatttagtgaatttcgcgtttttgaaaattaagggttgagggggtagggggatattttttagtcgtataggtgatttcgattttcggtggggtttttataattaggaaagaatagttttgtttttttttatgattaaaagaagaagttatattttttttatgatattaaatatttcgatttaatttggtagttaggaaggttgtatcgcggaggaaggaaacggggcgggggcggatttttttttaatagagtgaacgtatttaaatacgtttttgttggtaggcgggggagcgcggttgggagtagggaggtcggagggcggtgtggggggtaggtggggaggagtttagttttttttttttgttaacgttggttttggcgagggttgttttcggttggtgttttcgggggagatttaatttggggcgattttaggggtgttatattcgttaagtgttcggagttaatagtatttttttcgagtattcgtttacggcgtttttttgtttggaaagatatcgcggtttttttagaggatttgagggatagggtcggagggggttttttcgttagtatcggaggaagaaagaggaggggttggttggttattagagggtggggcggatcgcgtgcgttcggcggttgcggagagggggagagtaggtagcgggcggcggggagtagtatggagtcggcggcggggagtagtatggagttttcggttgattggttggttacggtcgcggttcggggtcgggtagaggaggtgcgggcgttgttggaggcgggggcgttgtttaacgtatcgaatagttacggtcggaggtcgatttaggtgggtagagggtttgtagcgggagtaggggatggcgggcgattttggaggacgaagtttgtaggggaattggaattaggtagcgtttcgatttttcggaaaaaggggaggttttttggggagtttttagaaggggtttgtaattatagatttttttttggcgacgttttgggggtttgggaagttaaggaagaggaatgaggagttacgcgcgtatagatttttcgaatgttgagaagatttgaaggggggaatatatttgtattagatggaagtatgttttttattagatataaaatttacgaacgtttgggataaaaagggagttttaaagaaatgtaagatgtgttgggattatttagtttttaatttatagatatttggatggagtttattttttttattaggagggattattagtggaaatttgtggtgtatgttggaataaatatcgaatataaattttgatcgaaattatttagaagcggtcgggcgcggtgttttacgttttgtaatttttttattttgggagattaaggcggggggaattatttgaggtcgggagttcgagattagtttggttaataggtgaaatttcgtttttattaaaaatataaaaagtagtcgggggtggtggtaggcgtttgtaattttagttattcgggaggttgaggtaggagaatcgtttgaattcgggaggttgaggttgtagtgaatagcgagatggagttattttattttagtttgggtgatagagtgagattttgtcgaaagaaagaaagagagaaagagagagagaaaaattatttagaagtaattatatattgtgtttatttttaattgagtagggtaaataaatatatgtttgttgtaggaatttaggaaataatgagttatatttatgtgattattttagaggtaatatgtagttattattttgggaatatttgttaatatttttgtttttttattatttttagtttatttgatatagtttatttgtgataagagtttttaattttttatttttgaatagaggtgttttttttttttttatttttgttttgtgagggagttaggggaggatttaaaagtaattaatatatgggtaatttagtatttttaaaattttgttaatagtttgaattcgggagtttggttttgtagttttataatattttagaagagattttatttgtttaaaaataaaaaggaaaaagaaaagtggatagttttgataatttttaatggagaagggagaagaatatgtagaaaaggggaaatgatgttggtttagaattttaattatattggtgtttaatataggaatatttatttatataatattttaaagtattaaatttatattagtatattattaaatggatatattattaaatgggtttaagtattttatatattttaatttaattgatttattttttttttgttttggatttttattatgatttaaatatttatatatgggttattttttagattttttatattatgaaatataagaaaaatttttaaggttagttttatgattaagacgaaggattttattgaatatataaaataataaatatattgtaatattttgtttttttttttgtagttgtaatttggtttgtttatattttttttttgtttttttgaaaattgagttagttttatttttttaggataggatttaataattataatataatttagtataattttttgatttaggtaaattatgtaatttgtgtttagtatgaaatgtatttaaaaataagtaatttttttttaatattattatttttaaattaatataataaataatagttattttaaaataaattgtttatttttattatgtagtatttaaattttaaggttgttatgattgtagatagtattttaaaatttttttttggaaatggttttgtttttaagatgatttaggaattaaagaggtgattattttttgtttaatgaatttttaaattataaatttgggaagtgttttagttttttattgttgttgttataaattattataaatgtgttagttaaaataaatataaaattattattttatagttttagagattagaagttaaaaatgggtttataaggttttattttttttggaaattttaaggggtaatttgtttttttgttttttttagtttttagtgattattaaattttttggtttatggtttttgtattttttttgtggtttgtgtttttatttttgtattttttttttgattgtgattttttaataaaaatatttggggttatgttgggtttattttgaaaattttggataattttttttaagattattaattaaattatatttgtaaagttttttttgttatataagttaatgtattaaaagtttttgaggattaggatatagatattgggggtgggggggtattatttagtttattataggaaggaattttagggttaattaaattagtttttttattttatatttgaagaaattgaagttttggaattggagagtattatgttaaatgaaataagttaaatatagaaagataaatattatatgtttttatttatttgtgaaatataaaataattatatttttagtagtaaagagtagaatggtggttattagagttggggggtgggaggaatggggagatggtaattaagatataaagttttagttaagatgggaggaataagtttgattgttttttttgagatgtgttttatagtatgatgaatatagttaaatagtaaattttaaatgtttttatttgataaaaatgttaaatatttgagatgatggataggttatttagtttgatttaataattttttattgtgtttaaagattataattttatattgtattatataaatatatataattgtattattttaatatataattttaaaattaatataatgaaaaagaaattgaagtttaatatttttagaagttaagtgtaatttaaaagttttgtgagaatttgttttaataaataaataagttttttttttttaataattattatattttgcgtttggatatatagtagtgaataaaaaaaaaaaaaaaaaaaaaaatttttaggtttaatataattttaggaagaaattttagtagttgtattttaggggaaatataggaagttagtttggagtaaaagttagtttgtttttgtttttttgttattttgttcgtgttttatagtgttttttgtttgtgacgatagtttcgtagaagttcggaggatataatggaatttattgtgtattgaagaatggatagagaatttaagaaggaaattggaaattggaagtaaatgtaggggtaattagatatttggggtttgtgtgggggtttgtttggcggtgagggggttttatataagtttttttttcgttatgtcggtttttattttggttttgattattttgttttttttggtagg

SEQ ID NO: 96 - DNA, 8666 bp, Artificial Sequence
  chemically treated genomic DNA (Homo sapiens)
tttgttagagagaatagaatggttagagttagggtgggggtcggtatgacggaaaggaagtttgtgtagagtttttttatcgttaagtagatttttatataagttttaggtgtttaattatttttatatttgtttttagtttttaattttttttttgagttttttatttattttttagtatataatgaattttattatatttttcgaatttttgcggagttgtcgttataggtagagagtattgtgaggtacgggtaaaatagtaaaggggtagggatagattgatttttattttaggttaattttttgtattttttttgagatataattattgaaatttttttttgaaattatgttaggtttggagatttttttttttttttttttttttgtttattgttgtatatttaagcgtagaatgtggtaattgttaaaaagagaaaatttgtttgtttgttaaaataaatttttataaaatttttaagttatatttagtttttgggaatgttgaattttaattttttttttattatattagttttaaaattatatattgggatagtatagttgtatatatttatgtggtataatatgaagttatgatttttgaatataatggggaattattaagttaagttaagtaatttatttattattttaaatatttgatatttttgttaaatgagagtatttgggatttattatttagttatatttattatgttatgaaatatattttaaaaaaaataattaaatttattttttttattttaattgaggttttatattttgattattatttttttattttttttattttttagttttagtaattattattttattttttattgttaagaatgtaattgttttatattttatagataagtgagaatatgtgatatttgtttttttgtgtttggtttattttatttagtataatgttttttaattttaaaattttaatttttttaagtataaaataagaaggttagtttaattaattttaaaatttttttttgtggtaggttgaataatgtttttttatttttaatgtttatgttttaatttttaaaaatttttaatatattaatttatgtggtaaaagaggttttgtagatgtgatttaattaatggttttgagggagattatttagaatttttagggtgggtttaatataattttaagtgtttttattagagggttatagttagagagaagatataagaatggaagtataggttatagagaaaatatagagattatgagttaaggaatttgatggttattagaagttggaaaagataaggaaatagattgttttttagagtttttaaaaggaatgaaattttgtggatttatttttgatttttgatttttagaattgtaaaataataattttgtgtttgttttagttaatatatttgtgataatttgtaatagtagtagtaggaaattaaaatattttttaggtttatgatttgagagtttattaaataagagatggttatttttttggtttttaaattattttggaaataaagttatttttagagaggaattttaaaatattgtttgtagttatagtaattttaaaatttgagtgttgtatggtggaagtagataatttattttaggataattgttatttgttatattagtttgaggatggtggtgttaaagaggagttatttatttttaggtatattttatattaaatataaattgtataatttgtttaaattaaggaattatattaaattatattatggttattaaattttgttttgagaaagtgaaattgatttagtttttaaagagataaagagaaagtataagtaaattaaattgtagttataaaaagaaagataaaatgttgtagtatatttattgttttgtgtatttaatgaagtttttcgttttggttataaaattagttttaaaggttttttttatattttatagtatgaaaaatttaaaaagtaatttatatgtaaatatttaaattatgatagaaatttaaagtaaaaagaaaatgaattaattgaattaaaatgtgtaggatgtttaaatttatttgataatatatttatttgataatatattaatatgaatttagtattttaaaatgttatataaataaatgtttttatattaaatattaatgtagttaggattttaagttaatattatttttttttttttatatgttttttttttttttttattaaaaattgttaaaattatttattttttttttttttttttgtttttaaataaataaggttttttttaagatattgtaggattataaagttaaattttcgggtttaagttgttggtaaaattttagagatgttaagttatttatgtattaattatttttaaatttttttttaatttttttataaaataggagtagggagaggagaaatatttttgtttaaaaatgaggaattgaaaatttttattataaataaattatattaagtaagttaaagatagtaaaagagtaaaaatgttagtagatatttttaaaatggtaattatatattatttttggaatgattatatgaatgtggtttattattttttaagtttttatagtaaatatatatttatttgttttatttagttaaaaataaatataatatgtagttgtttttgaataatttttttttttttttttttttttttttttttttcgataaagttttattttgttatttaggttggagtgaagtggttttatttcgttgtttattataattttagtttttcgggtttaagcgatttttttgttttaatttttcgagtagttgggattataggcgtttgttattattttcggttattttttgtatttttagtagaggcgaggttttatttgttggttaggttggtttcgaattttcgattttaggtgatttttttcgttttgattttttaaagtgaagggattataaggcgtgaggtatcgcgttcggtcgtttttgaataatttcgattaaaatttatattcgatatttattttaatatatattatagatttttattgataattttttttagtaagaaagataagttttatttaggtatttgtgaattggaggttaagtagttttagtatattttatatttttttaagattttttttttattttaaacgttcgtaaattttgtatttgataaagagtatatttttatttaatataaatatgtttttttttttagatttttttagtattcgagagatttgtacgcgcgtggttttttattttttttttttggttttttaagtttttagggcgtcgttaggaggaggtttgtgattataaattttttttgaaaattttttaggaagtttttttttttttcggagaatcgaagcgttatttgattttaatttttttgtaaatttcgttttttagagtcgttcgttattttttgttttcgttgtagattttttatttatttggatcggttttcgatcgtaattattcggtgcgttgggtagcgttttcgtttttagtagcgttcgtattttttttattcgatttcgggtcgcggtcgtggttagttagttagtcgaaggttttatgttgtttttcgtcgtcggttttatgttgtttttcgtcgttcgttgtttgtttttttttttttcgtagtcgtcgagcgtacgcggttcgttttattttttggtgattagttagtttttttttttttttttttcggtgttggcggaagagtttttttcgattttgttttttaaattttttggagggatcgcggtatttttttaggtaaggggacgtcgtgagcgagtgttcggaggaggtgttattaatttcgagtatttagcgaatgtggtatttttgaagtcgttttaggttgggtttttttcgggggtattagtcggaagtagttttcgttagagttagcgttggtaaggaaggaggattgggtttttttttatttgttttttatatcgtttttcggtttttttgtttttagtcgcgttttttcgtttgttagtaaaggcgtgtttgagtgcgtttattttgttaaaaagaaattcgttttcgtttcgtttttttttttcgcgatataatttttttaattgttaaattgaatcggggtgtttggtgttatagggaaagtatggtttttttttttaattataagaaaaagtaaaattatttttttttagttgtgagagttttatcgagaatcgaaattatttgtacgattagaaagtgtttttttatttttttaatttttgatttttaggagcgcggggtttattaagttagaaattttagtttaaaggattttttttggagagtcggattgtttttttttttttttttttttttttttttgcgtgtaaaacggttgtttggggtaagggttttttagacgtgtatattgtttggtataagagtagattttgaaaagatgaggtttatttaatacggacgggggagaattttgtttgtaggtagataggaaaatggggagggagttattggaaggacggattttatttttaaagttataatttttagattagaaaaagtgtttagtgttttagaagtagagttgtatagtgatttaaagattagttttaaatattgttttgttttttttatattttttatattttttttttttattgaaaatattttgtatttttcgtaattataaagggggaagggaatatgagtgttttttgttttataggggttgttgtgagtttaaatgatgtattaatatatataagttttaagaatagtgttatatattttaagttaatatttgttagtttttgaattattcgttttgaggattggtttgtaattttgttttgaggtatagaaagaaaatgttttggagtaggacgcggtggtttatatttgtaattttagtattttgggaagtcgaggcgggtagattatttgaggttaggagttcgaggttagtttggttaaaatggtgatatttcgtttttattaaaaatataaaaattagttggttatggtggcgtacgtgtgtaattttagttatttaggaggttgaggtaggagaatcgtttgaattcgggaggtagaggttgtagtaagtcgagatcgcgttattattttttagtttgggtgatagaatgagatttcgatttaaaaaaaaaaaaaaatgttttggatagaattattattattatataaaaggaaagttcggatgcggtggtttacgtttataattttagtattttgggaggtcgagataggcggattatttgaggttaggagttcgagataagtttgattaatatggcgaaattttgtttttattaaaaaatataaaattagcggggtttggtggcgtatgtttgtaattttagttattcggaggttgatgtaggagaatcgtttgaatttaggagaaggcggaggttgtagtgagtcgagatcgcgttattgtattttagtttgggagataagagcgaaatttggttttaagaaaaaaagaaagaaagaaagaaagaaagattaagaagaatttattttttgaaaagattatgggtattttttattatttttatttataaagaaaagttaaatagtattaaagagtataataagcgtaaggaggtaaaagttttaattttttttgtgattattattttttaagtttattaaaaatatgtattacgttttaaaaaatggattgtttagattttgttgatgttttaagtatatgtttaatttgtttattggataatttagttttgtttaaaagttatattttaatttttggttgatttaaattttgtagatttagtatattttgtatttttagtgtttgtttgattttaaaatatgtagtttttaaaatgaagttaatgaaaataatttgggatgttaagtatgttattaaaatttataatgtattattgtattatttatatttttttcggggtattttttaattagttgtgtagtaatgatagggaaaatttaaattatcgataaataaaattattttagtttagtttaagatattttatgatggaggaggaagaaagtggttgttaggatgggagggagggaatatatttttattattaatataatggttttttttttttgtttgtttgttttgtgtgtttttttgagatggagtttcgttttgttgtttaggttggagtgaaatggtatcgtacgatttttttcggtttattgtaattttcgtttttcgggttcgagtaatttttttgttttagtttttcgagtagttgggattataggtatatgttgttatatttagttaatttttgtattattagtagagacggggttttattatgttggttaggtttgtttcgaatttttgattttaggtgatttatttattttagttttttaaagtgttgggattataggtatgagttatcgtgttcggtttatagtggtttttaatgggggtgggagagtgggaagagtaggtttttttaagagtttgttgaaataaatattttttttttaaaaaagaaagtaggtaatgattttttttaaaaaagatgtgtttatttgtatatgtatttttagataaaatttttagtgaatttagggatttttttgaaattttattatggatttttatattaagaatttttttagtttttgtgaaaaatatatatagttattggtgaagaagatgggagatgtaattatataaaaataatatttggatgtattataaataggtgtaaaagttgattgttttggaaatattaagaataagttttagatatgtatattttatattttgtagtagagttttggaaggattatggtatttttgggtggggttattttgttttagaaattgaagtttattatttattataaattttatgtaggggggaggggggagggatagtattaggagatatatttaatgttaaatgatgagttgatgggtgtagtatattaatatggtatatgtatatatatgtaataaatttgtatattgtgtatatgtattttaaaatttaaagtataaataataataaaattaaaaaaatattatgtaaataattaataatagtgggaaaatttttttagtttttttgttaaagagtttattatatttttagtttatttatatatatcgatttgaggtgtaaaattttagaagaatgaaaatataaagttttggatttttgtgttttttatgttagttttagattttttatgtgtaaaatgggattataatatattttatgtggttataaaatatgataatgtatgtttaaaagtttttaatgtaaaaatttattatatttattaaatttattaaagtttgttggttattgttattattatttttatatttatttttttttttttttgagaatgttattttttttttagatttgtattgtttttgtagttttgaaaattttatacgtgaaatttaaatttgttttaattttgattagttttataataaaaaaagattattatttgtttatttatttaataagtttagaaattaagggtagatatggggtgggggtagaggggagtaggttaaatatagtatttttatagttagattgttagggtttaaattttaattgttttatttattggttttttaatttttattaaagttatttaatatgtttgggtttttgtttttttatttgtatgattaggataataattgtatttgttttaaatagttgtttagggattaaatgaagtatgtaatgtttttagaagagtaaaataaagtatagaatgatataagaaaatgaaaaggtgattaaatttatttttatttgtttttagtaggtaaaggttttcggatgttgagagttgattttagttttgaagaatgatgtgagagtttaaagatggaaaagaaggagaaagatattttaggtagaggtaagaggatgtgtaaaggtatagaagtttaggaaaattgaaagtaatttatttagatttatttttgaaaattagtttgtgaaggattttttagagagttaaaagaaaaattaggataatgggatggtaaggaagtggggatattgcgttgattatttttttatagtttggttgtgatagtttaaggttttatgttatgaagtgaggtagatggaaggtggaggagatttgagtatatatatatttggaagggtaagtgttaagtgaagagaagggaaagttagaaaagaataaaagaaaagttaagtatataggtaagataggatatttttgaggatttgaggttttttaaaaataatgaagaaatagaatttaaagtatagcggtggttatagattttgttataagagatatatagatttgggagggagaaaaggttagaacggggaggaagttgaggtatttttttttatgaatgaggaggttagtttgtttgtagagtgaaaataagatggtcggttaggaagtttgagaatcgtaaaggtttggaatattttttatgagtagagaggatgggttgagtaagatttagatagagaagttttttgttttgttttttaaaattagattggagaatttagttgagggtggagattatgatatagtagggatatttgattattttttttaaattaaagaaagttttgtag

SEQ ID NO: 97 - DNA, 7309 bp, Artificial Sequence
  chemically treated genomic DNA (Homo sapiens)
atgcgattaatggtgttaattgttttttggattgtttttatagtataggataagattatattagttttagtaggttttattgaagaaagtttatgtgttttgtagaaataagatttttagtttagtttaataggagattaattatatgtttattttatttttttttaaggtatgatagtatttggttgagatgtttgtgtgtattttttgtgtgaagttgagtatgtaatttttaaagaaattataaaggagttattcgtttttaaaggaaaaatatatgaattttacgggtataaggaagatattaaaatagggttggggagaagtttttttttttttattttatagtattttttatagaaataattgattgtttgaatatatggttattgaaatatatatatatatatatatatgtatatgaaaataagagttggaatatttgattttgttttttattttttattattttagataatataggatataatatggttttattgtatatatgtgttttttggtttaaaaatattgagagtagatttttgtggaaagaaatatgaaaatttgaggatttatgcgaatgtagttagaggcgaatgtagttagaggggtttttaatttgttggtagagttgggggagagttggggtaattttattgttatgaaattggttttagatggaggtaaggaaaggtgtttattttttgttggtgttagatatagagagattttgtagtatttcgtattttaggtttagaattgtttagtgttgggtagtagttttattgagggtttggttagagtttatggggatgggtggattaggttgtttgttgtttggaaaaggttattttgaatataatgatttttatatggacggtggggtttgggggaaggtatcgtggttagggtttggaggggaagagggaggaaagtaaagaggagtttttttatgaggtaatagaaatgatagtattttttttaggttgaatttttaaaatttagttttgttttggaagattgggattgtggtattttttgtagtgtttttagatcgttttaaggtttttaaattaatgatttataattatgttgtttttttagagagtatttttttttttggttgatatgtggttagtttaggggtggaggagtttcggtagttacgaatttagacgggatgttgattgagagttttgtggttatggtagatgggaggggtgagttttatttatttaaaggtattcgtattttatcgatgagtgtggaattgtgttttttcgttttcgtagtgagacgatcgattaggattgtaggttgagtaaatgggtgttttttggtttatagcgttttttagtattagttagcgggatagagtttcgtgaattttttaaggagttattatttgtttgtttgaatgttggaaaggggtcggtggtgttgattattggatttatttaattaatatttattaaattcgttgttattaatatttaatttttgtgttttaggggtttagattttagtaagggaaatagatgggtaaataattatattagagttagttaagtattgttaaagaagttgatatagggtgttgtggggatatatgggaggggaattagaggaggtttttcggaggaggtgatatttaagttgaggtttgaaggatgtggaagagtttagtaatttttgaagattaaaaaaatggtgataaaaaagatatttttttaattttttagtgttacgatttaagagataaataagtaggtgaacgtataattatattgggttttattataagttagagtttgttttttttaggattttggtattataattttttttgaaattttgttttcggtattgatttttgggggaggtagtaatataggaatttagtgttcgttgcgaaattgatggatggtttttagttttgggtacgtttttatgtgttaaatttgtttaaatggtaggatttattttttttttagaagtatttatttgttttataggattttttatggaattttggagtttttgaggcgagagggattttggatattattgagttttattttttatttaataaatatagaagtggacgtttggataggtaaagtgatttgattaaggtaggtgtatagttattttgtaatattgggaataaattttaggttttttgattttttgtttttattttattttttttttattttttagaaataaagtttttatgtgtttttttttatagtgatatgtttggaatgtattagttagtaatttaggaagggaaaaaaataaatatataagagataaatttgttaggaggataaatttgtattgtttttgattggtttagagggtgattattattatggtagagaattatttaattagtgtaagtaaaatttttttgtgggttgggtattgtataaagatttaaacgaatttgtttatagatttgaaaagtagatacgagatttgtgaatggttggggtttttaagtttatagtataagtatgggttatattttatagtttggaggattgagttttgaaaatgggtaagtttttttatttttttgaattttattttttttatatttaaaataaggatgagtagtttttgaggttttttttacgatttttttttttatagattttagtattttataatttgatataaagagggtggatatgaatttattttttttagaaaagttttaggaaagagaatattaggttattttagtaggtgtgtagataggttagatagattttgaaatttatttagttttttttagatgtataattttattattgtttttagttgttaagagaaagtaggagagtttgtatttttattttttttttttttttttttttttttggagacggagttttattttattatttaggttagagtgtagtggtatgattttagtttattgtaagtttcgttttttaggtttacgttatttttttgttttagttttttaagtaattgggattataggcgtttattattatatttggttaattttttgtgttgttagtatagacggggttttattatgttagttaggatggtttcgattttttgatttcgtgattcgtttattttggttttttaaagtgttgggattataggcgtgagttatcgtatttagtttgtatttttatttttattgttagttttaggtttattttatttagtttattaagtgatgttgaataattaatttttatatattattaggtttatggatattatgatatttagattgatgggtgtttgttgaagggggtgattttagtaggaggatttttttacgtaaggatttatggagtttgttgttttttttttttagggtgagaattaaattgtttttatacggtgggtagaggggaattgatttaggtttggaataagagagaatattttaattgaaaagtttttggaattcgttgaattttaagatattgtgtggattagtttaggatagggagtgagaagaaattaattaaaaggtaatttcgttattttttagttggaaaaaagattagattatatttgtgtttttataattaagtagttgttggaaaaaaacgttttagatgttttttatgagaaaattgttgtttgaagtttagtagaagttatttatttgatatttatattttaggtaaggtttttcgttggagaaaatatcggtattttggataaaattgaaatgtgaaaagaaagggaagagagggtttttattatgtaagatgtttatttaaagtggatttggtttggaaagttttttaaaattttttatatgattgtggaataagttatgtggggcgcggggataagcgaattttttaaattttattacgtatgtttttatttaatttggatttttagagtggtttttagggtattttgtttaggatttagttagttgttggttatatttatgttttttagttttttgagattttatttggttttgagagggttaaaaagtagtgtggttaaatattttaggttttaaagtatttttattgtggttggggaagtaatagaattatattttataaaataatgaaaatagtgttagaaaaatatcgagagatagaaatatttttacgagttaggttatagttagagtgaaggtagggaaggtttttaaagttgggtggaggggataagttaaaaagatgtggaaattggttttttttttttatggttaaagtgtttaaaggggaaaaaggagttttaaaaatgtttttggaaatattattttttacgaatttttcggtttttgttgttttaatgttatttgtttgagatgtaaatagaggagttttgagaaagaagttgaatttgtatttttttttgtttttatttgttttaaatttgtggtatttttaataggatgaagcggaagagaaagggaaagagataaaagtgtagaaagatggaagattttagttgtaaatggttatttgtagttagatggaatagttgttgacgtttagggaaatgtatgtttttttttagatgggaaggagtagtggaaaggggtgacgagtttttggttggttattaattattttatttttttgtgtcggttttttatttggaaagtgggagtgatatttgtgtttgttttttttatttataaagattattgtgagagttataatacggtgagatatagaattttgtttttaaaaatataaagtagaattaagatgttaataataaggatagtaattgtgttagttatttgtaattatttattatagttagtcgtttaggattttggatcgtttttttggttttattatagttttggattagtttatttttaaattttttgttgaagggtggagttttgttagttatgggtagggaattatttttttttgtttttttattttttgttttttaaatatgtttagggtttttgtatttgttgttttttttgtttggtattttttttttgtggtttgttttagagttgatttttgtttttgtttattttttagcgaggatggtattttagggagttttttttttattatcgtagagagagtaggttttttttagttatgtttaatttagaattttgttttgttttttttatagttttagtattatagaaaattattttgtgtatttatggatgtttacgggggtaagggttttgtgttgtttaatttagtattttgaatcgtgtttgttgaatgaatatagaatttcgtttgttttgggagagtatagaaaatagttttttattatatattatagttagttgtaaatagtagatggttttttatattttagagagtaagaattagagagagagagaaagagagagagtttgggttttttttttttgtgtttgttttttttagagaaattggaggggtagtagttagtattttttcgttggttttattaagtatagttaaggtttttaggatatggttattttttatttgtggaagcggttttgttggggtgggtgggtgttagttggttttggtttgggttagagatatttagtggtttaggtgggcgtggggttagggcgtagacgagaaggggtacgagggtttcgtttcgaggatttagcggtaagtatcggtttcgggcgcgttttagtttatttattcgcgtgtttacggcggtattattttttataaggatttgaacgattcgggggcggtttcgtttcgttattttttgttttcggtttcgttttttttttggagggtcgatgaggtaatgcggttttgttattggtttgagggggcgggttttaatagttcgaggcggggttttcgggggtttagcgttatattattcggtcgtttaggtagcggcgtagagcgggtagtaggtaggcggcgggcgtttagacggtttttttttttttttttgtttttttagtttttgttttttcgtcgggaggtcgttcgtcgagttttgcgttagcgtcgaggtagtttcgttgcgttttatttcgtttcgtcgggtattcggagggtagcgcgtcggaggttaaggttgtttcgtacggttcggcgggcgagcgagttcgggttgtagtagtttcgtcggcggcgcgtacggtaattttggagaggcgagtagtagtttcggtagcggcggtagtagcggtaatgattttttggttcgggtttatcgtgtttttgggtagttggagtttgggggattggggcgtcgaggcgtgtatatgttcgtttagttatttttaggacgttttttgtaatttcgatatcggtaagcgtttttggtgtttcgttcgagttttacgttgtagttaggattgtagcgttgtttagggaggtagggcgagttttattttttttttttgttttaggagaggggtagacggggttggggcggagtggagaaattcgatgtttttgggcgggggcgttggtatagttgagaggggaagatgttttgtagaggaaatttatagtggttgagggagtttttggtcgtttttgtttttttaatttaggtcgtgaggtttttatcggtttttttgatatttggaaaatgtttttatttattattaacggaggaagggttagaagagaagggtggggaaagggtttttaaaatttggaatgttaattaaagtgttgggaaattgaatagttaaaaaaaaaaaaaaaagttgttcgttatgtgtacggaaagttgtaggagaaatttggagtatttcgagtttgtattattttttgcgtttatgaaatttattttttttattgagatttaatttagttgtaggttttttaggtaagcgttaatcgagtttttgggattgttaagtttgggtggatttaagggggaaaatgaggagaaagttgtggtattgatttacgttttggaggtattgtgtttgagagtgttgatagttagtagaaggtgcgaggggttatttattatatagttgtgaaaatttataggaaggttattttttttttttttgaatgtgtgtggggagggggagaatgggtagtggaaaatagatttgttattaaaagaataaatttgttaagggttatattacggtgatagttttagattggatttagtgttttgagtagagagattttgtaaagagattttttattttttagtgtgtatggagggtttcgagagtattttgggaggtttgtttgggagtgtttgggatatttgtgtttggatggttaaaggtggagtggtatttgggaaatatttttttttttttttttagtttataaag

SEQ ID NO: 98 - DNA, 7309 bp, Artificial Sequence
  chemically treated genomic DNA (Homo sapiens)
ttttatgggttggaaaggaggagagagatgttttttagatgttattttatttttagttatttaaatataagtgttttaaatatttttagataagttttttaggatgttttcggggttttttatatatattaaggagtaggaggtttttttatagggtttttttatttaagatattaagtttagtttggaattgttatcgtgatgtgatttttggtaggtttgtttttttggtgataaatttgttttttattatttattttttttttttttatatatatttaagggggaaaaaaatagtttttttgtgaatttttatagttatgtggtgagtgatttttcgtattttttgttggttattaatatttttaaatatagtgtttttagggcgtgggttaatgttatagttttttttttatttttttttttaaatttatttaaatttggtagttttagaagttcggttagcgtttgtttgggaagtttgtagttgggttgggttttagtgaaaagaatgaattttataggcgtaggagatgatgtagattcggagtattttaagttttttttgtaatttttcgtgtatatggcgggtaatttttttttttttttttaattatttaattttttagtattttagttagtattttaagttttgggaattttttttttattttttttttttagtttttttttcgttagtagtgaatggggatattttttagatgttaaaaggatcggtaggaattttacgatttaagttaggaaagtaaaggcggttaggggtttttttagttattgtgagttttttttgtagggtattttttttttttagttatgttagcgttttcgtttaaggatatcgagtttttttatttcgttttaatttcgtttgttttttttttggggtagaggaaaggagtggggttcgttttgtttttttaagtagcgttgtagttttggttgtagcgtggggttcgggcggggtattaggagcgtttatcgatgtcggagttgtagaaggcgttttgggggtggttgggcgagtatgtgtacgtttcggcgttttagttttttaggttttagttgtttaggagtacgatgagttcgagttaaggggttattgtcgttgttgtcgtcgttgtcggggttgttgttcgtttttttaaagttgtcgtgcgcgtcgtcggcggggttgttgtagttcgagttcgttcgttcgtcgggtcgtgcggggtaattttggttttcggcgcgttgtttttcgagtgttcggcgggacgggatggggcgtagcgaggttgtttcggcgttggcgtaggattcggcgggcggtttttcggcgaaggagtaggagttggaggagtaagaggaggaggagaagtcgtttgagcgttcgtcgtttgtttgttgttcgttttgcgtcgttgtttgggcggtcgagtgatatagcgttgggttttcggggatttcgtttcgggttgttggggttcgtttttttagattaatggtagagtcgtattattttatcggttttttaaaaagggggcggggtcgggggtaaggggtaacggggcggggtcgttttcggatcgtttagatttttatagggaataatgtcgtcgtgggtacgcgagtgggtgggttggggcgcgttcgggatcggtgtttgtcgttgggttttcggagcggagttttcgtgttttttttcgtttgcgttttggttttacgtttatttgggttattgggtgtttttgatttaaattagaattaattaatatttatttattttagtaggatcgtttttataggtgaggggtggttatgttttagagattttgattgtgtttggtggaattagcgggggaatgttaattgttatttttttagtttttttggagagagtaggtatagaggagaaagatttaaattttttttttttttttttttttttggtttttattttttgggatatgggaagttatttgttgtttgtagttggttatgatatatgatagaagattgttttttgtgtttttttagagtaaacggggttttgtatttatttaataaatacggtttaggatgttgggttaagtaatataaagtttttgttttcgtggatatttatgaatgtatagggtgattttttgtgatgttagggttatgaagaaaataaaatagagttttgggttggatatgattggggagggtttgttttttttgcgatagtaagggaagggttttttgaagtgttattttcgttgagaagtggataaagataaggattagttttggggtaagttataggagagaggtattaggtagggggaatagtaagtgtaaagattttgggtatgtttgaaagatagaaagtagaaaggtaagaggaagtggttttttgtttatggttgatagagttttattttttagtaagggatttgggggtgagttgatttaaaattgtagtaaaattaggagaacgatttaggattttagacgattagttataatagatgattgtagataattaatataattattatttttattattgatattttgattttgttttgtatttttaaaagtaggattttgtattttatcgtattatagtttttataataatttttgtgggtaggaaaagtaagtataagtattatttttattttttagatgaggaatcggtatagaaagatgggatgattggtggttagttaggaattcgttatttttttttattgtttttttttatttgaagagagatatgtatttttttgaacgttagtagttgttttatttaattgtaaatggttatttgtagttgggattttttatttttttatatttttgtttttttttttttttttttcgttttattttgttagaaatgttataagtttggaataaatagaaatagggagaaatgtaagtttagttttttttttagaatttttttgtttatattttagataagtgatattgggatagtagaggtcgaagaattcgtgagagatggtatttttaagaatatttttgaaattttttttttttttttgagtattttagttataggaaagggaaattagtttttatatttttttgatttgttttttttatttagttttaaaaattttttttgtttttattttaattgtggtttaattcgtagagatgtttttgtttttcgatgtttttttagtattgtttttattgttttatggggtatgattttattgtttttttaattatagtaggaatattttgaggtttgggatatttagttatattgttttttagtttttttagaattaaatagggttttaggagattggagagtatgggtgtggttaatagttgattgagttttgagtagagtgttttggaggttattttaaggatttaggttgaatgagggtatacgtggtggaatttgagagattcgtttattttcgcgttttatatgatttattttatagttatgtggaaggttttagaagattttttagattaaatttattttggataagtattttatatgatagaggtttttttttttttttttttttatattttagttttgtttaaagtgtcgatattttttttaacggaaggttttgtttggaatataagtattaagtagataatttttgttgaattttaagtagtagtttttttatagaaagtatttgaagcgtttttttttagtagttatttaattatgaaagtataagtataatttgattttttttttagttgaaaagtaacgaaattattttttggttaatttttttttattttttattttaagttggtttatatagtgttttgaagtttagcgaattttaagagttttttagttgggatgtttttttttattttaaatttgagttagtttttttttgtttatcgtgtgaaggtagtttggtttttattttaaggaaaagaaatagtaaattttatgaatttttgcgtaggggagtttttttgttagggttattttttttagtaggtatttattagtttggatgttatggtgtttatgagtttaataatatgtaagaattggttatttaatattatttaataagttaggtggggtgaatttgaggttaatagtaagaatgaagatgtaggttgggtgcggtggtttacgtttgtaattttagtattttgagaggttaaggtgggcggattacgaggttaggagatcgagattattttggttaatatggtgaaatttcgtttgtattaataatataaaaaattagttaggtgtggtggtgggcgtttgtagttttagttatttgggaggttgaggtaggagaatggcgtgaatttgggaggcggagtttgtagtgagttgagattatgttattgtattttagtttaggtgatggagtgagatttcgtttttaaaaaaaaaaaaaaaaaaaaaaagaatgaagatgtaggtttttttgtttttttttgatagttaagaataatgatagagttatatatttgggaagaattgagtaagttttaagatttatttggtttgtttatatatttattaggatgatttggtatttttttttttggaatttttttaggaaaggtgagtttatatttattttttttgtattaagttataggatgttagagtttgtaggaagagaagtcgtaaaaaggattttagaaattatttatttttgttttaaatgtgggaaaaataaggtttagagaagtgaaggaatttgtttatttttagggtttagttttttaagttgtaaggtgtggtttatgtttgtattgtgggtttggaaattttagttatttatagatttcgtatttgttttttagatttgtagatagattcgtttgagtttttgtatagtgtttagtttatagagaaattttatttatattgattaaataattttttattatgataataattattttttgagttaattagaagtaatataggtttgtttttttgataggtttattttttgtgtgtttatttttttttttttttaaattattagttaatgtattttaaatatattattataaaaaaaagtatatgaaaattttgtttttgggaaatgaaaagagagtaaagtggaaataaaaaattaaaagatttgagatttgtttttaatgttgtagaatagttgtgtatttgttttggttaagttattttgtttgtttaggcgtttatttttgtgtttattggatgaaagatagaatttagtggtatttaggatttttttcgttttaaaaattttaagattttatggggaattttgtaggataagtgaatgtttttgaaggggagatgggttttgttatttaaataggtttgatatatgggaacgtatttaagattgaagattatttattagtttcgtaacgaatattgagtttttatattgttattttttttaagaattaatgtcgaaaatagaattttagagaagattgtgatgttaaagttttaggagagataggttttggtttatggtggagtttagtgtagttatgcgtttatttgtttgtttgttttttggatcgtagtattaaaaagttaggaaggtgttttttttattattatttttttggtttttaggagttattgaatttttttatattttttagattttagtttagatgttatttttttcgggaaattttttttgattttttttttatgtatttttataatattttgtattaatttttttgataatatttagttgattttaatgtgattatttatttatttgttttttttgttggagtttaagtttttagaatatagggattaagtgttggtaataacgagtttaataagtattggttgaatgggtttaatgattagtattatcgatttttttttagtatttagataggtaggtggtggttttttggagagtttacggagttttatttcgttggttggtgttagggggcgttataagttagagaatatttatttgtttagtttgtagttttggtcggtcgttttattgcgagggcgggagagtataattttatatttatcggtggggtgcgggtgtttttgagtgggtgaagtttattttttttatttgttatggttataaagtttttagttaatatttcgtttgggttcgtggttgtcggagtttttttatttttgagttggttatatgttaattaaagggggagatgttttttggggaagtaatatagttgtgaattattggtttgggggttttagggcggtttgggaatattgtagaggatgttatagttttagttttttagggtagagttgggttttggaaatttaatttggagaaggtattgttatttttgttgttttatagggaagtttttttttgtttttttttttttttttttttagattttagttacgatgtttttttttaagttttatcgtttatgtgaaagttattatatttaaaatggttttttttaagtaatagatagtttggtttatttatttttatgagttttggttagatttttagtggggttgttgtttagtattgggtaattttgagtttaagatgcgaggtattgtaggatttttttgtgtttggtattagtagggggtaaatatttttttttgtttttatttggagttaattttatggtagtaaaattgttttagtttttttttagttttgttagtaaattgaagatttttttggttatattcgtttttggttatattcgtatgaatttttaggtttttatatttttttttatagggatttatttttagtgtttttaagttagaaaatatatgtgtgtagtaaagttatgttgtattttgtgttatttagggtggtgggaaatggaaagtagagttaaatattttagtttttgtttttatgtgtatgtatgtgtgtgtatgtatgttttaatgattatatatttaagtagttaattatttttgtgaagggtattatgaaatggaaggagaagaatttttttttaattttgttttaatgttttttttatgttcgtggagtttatgtgttttttttttaaaaacgagtagtttttttgtggtttttttgaaggttgtatgtttagttttatatagagaatatatataagtattttagttaggtgttgttatgttttgggagggaatgggatggatatgtggttggttttttgttagattgggttggaggttttgtttttgtaaggtatatgagttttttttagtggaatttgttggaattgatatggttttgttttgtgttgtggggatagtttaaagagtagttaatattattgatcgtat

SEQ ID NO: 99 - DNA, 3715 bp, Artificial Sequence
  chemically treated genomic DNA (Homo sapiens)
gaatttcggcggagagaattttttgtttttttttattttttttttatttttttttgttttttttatttcgagtgcggagtagagattaaaagatgaaaaggtagttaggtttttagtagttaaaaaataaaataaataaaaataaaaaagtcgaaataaaagaaaaagataataatttagtttttatttgtatttattttagtggatattgaatttggaaggtggaggattttgttttttttttttaagatttgggtattttttgaatttattttttaagtattaagagatagattgtgagtttagtagggtagattttgtttatcgtgtgtttttttttgtacgagattttgaggttgttagagcgttttttgcgtggttgttttcgtaagtttttttttttggagtttttcgtaggtgggtagttagttgtagcgattatcgtattattatagtttgttgaatttttttgagtaagagaaggggaggcggggtaagggaagtaggtggaagatttagttaagtttaaggatggaagtgtagttagggttgggaagggtttattttcggtcgtcgtttaagatttatcgaggagttttttagaatttgttttagagcgtgcgcgaagtgatttagaattcgggttttaggtatttagaggtcgcgagcgtagtatttttcggcgttagtttgttgttgttgtagtagtagtagtagtagtagtagtagtagtagtagtagtagtagtagtaagagattagttttaggtagtagtagtagtagtagggtgaggatggttttttttaagtttatcgtagaggttttataggttatttggttttggatgaggaatagtaatttttatagtcgtagtcggttttggagtgttatttcgagagaggttgcgttttagagtttggagtcgtcgtggtcgttagtaaggggttgtcgtagtagttgttagtattttcggacgaggatgatttagttgttttatttacgttgtttttgttgggttttatttttttcggtttaagtagttgtttcgttgattttaaagatattttgagcgaggttagtattatgtaatttttttagtaatagtagtaggaagtagtattcgaaggtagtagtagcgggagagcgagggaggtttcgggggtttttattttttttaaggataattatttagggggtatttcgattatttttgataacgttaaggagttgtgtaaggtagtgtcggtgtttatgggtttgggtgtggaggcgttggagtatttgagtttaggggaatagtttcggggggattgtatgtacgttttatttttgggagttttattcgttgtgcgttttattttttgtgttttattggtcgaatgtaaaggttttttgttagacgatagcgtaggtaagagtattgaagatattgttgagtattttttttttaagggaggttatattaaagggttagaaggcgagagtttaggttgttttggtagcgttgtagtagggagtttcgggatatttgaattgtcgtttattttgtttttttataagttcggagtattggacgaggtagttgcgtattagagtcgcgattattataattttttattggttttggtcggatcgtcgtttttttcgtcgtttttttatttttacgttcgtattaagttggagaattcgttggattacggtagcgtttgggcggttgcggcggcgtagtgtcgttatggggatttggcgagtttgtatggcgcgggtgtagcgggattcggttttgggttatttttagtcgtcgtttttttattttggtatattttttttatagtcgaagaaggttagttgtatggatcgtgtggtggtggtgggggtggtggtggcggcggcggcggcggcggcggcggcggcggcggcggcggcggcggcggcggcggcggcgaggcggaagttgtagttttttacggttatattcggtttttttaggggttggcgggttaggaaagcgattttatcgtatttgatgtgtggtattttggcggtatggtgagtagagtgttttattttagttttatttgtgttaaaagcgaaatgggtttttggatggatagttatttcggattttacggggatatgcgtttggagattgttagggattatgttttgtttattgattattattttttattttagaagatttgtttgatttgtggagatgaagtttttgggtgttattatggagtttttatatgtggaagttgtaaggttttttttaaaagagtcgttgaagggaaatagaagtatttgtgcgttagtagaaatgattgtattattgataaatttcgaaggaaaaattgtttattttgtcgttttcggaaatgttatgaagtagggatgattttgggagttcggaagttgaagaaatttggtaatttgaaattataggaggaaggagaggtttttagtattattagttttattgaggagataatttagaagttgatagtgttatatattgaaggttatgaatgttagtttatttttttgaatgttttggaagttattgagttaggtgtagtgtgtgttggatacgataataattagttcgatttttttgtagttttgttttttagttttaatgaattgggagagagatagtttgtatacgtggttaagtgggttaaggttttgtttggttttcgtaatttatacgtggacgattagatggttgttatttagtatttttggatggggtttatggtgtttgttatgggttggcgattttttattaatgttaattttaggatgttttatttcgtttttgatttggtttttaatgagtatcgtatgtataagtttcggatgtatagttagtgtgttcgaatgaggtattttttttaagagtttggatggttttaaattattttttaggaatttttgtgtatgaaagtattgttattttttagtattattttagtggatgggttgaaaaattaaaaattttttgatgaatttcgaatgaattatattaaggaattcgatcgtattattgtatgtaaaagaaaaaattttatattttgtttaagacgtttttattagtttattaagtttttggatttcgtgtagtttattgcgagagagttgtattagtttatttttgatttgttaattaagttatatatggtgagcgtggatttttcggaaatgatggtagagattatttttgtgtaagtgtttaagattttttttgggaaagttaagtttatttatttttatatttagtgaagtattggaaattttatttttttattttagtttatgtttttttttagatgttttttgtttgttataattttgtattatttttttgtagtgttttgtttaattttttttattgatgtatagtttgttatggaattttatttgttgggtttttttttttttttttttttttttttttttttttttttttttttatttaatttttttatggtatttttagattttgttttttattgtggtttttatttgtgttttgaatggtgttgtatgtttttaaatttgtgatgatttttatatggtttagtgttaagttgtgtttgtttatagtattattttgtgttagttatataaacgtttatttattttatgttacgggaagtttagagagttaagattatttggggaaattaaaataaaaatattcgaattt

SEQ ID NO: 100 - DNA, 3715 bp, Artificial Sequence
  chemically treated genomic DNA (Homo sapiens)
gaattcgggtgtttttgttttgatttttttagataattttagttttttaaatttttcgtggtataagataagtaaacgtttgtgtggttggtatagagtagtgttgtaaataagtataatttgatattgggttatatgaggattattatagatttaaaggtatataatattatttaaaatatagataggagttataatgggaagtaaagtttgaaggtgttatgggagggttagatagggagggaagaagaaaaagaaaggagagaaagagaaaaaaaaagtttagtaaatagaattttatgatagattgtatattaatagaggaaattaaataaggtattgtagaggagtagtgtagagttataataggtagaagatatttgaaagggggtatgagttggggtggggaaatagggtttttaatgttttattgggtgtggaaatagatgggtttgatttttttagaaaggattttgggtatttgtatagagatgatttttgttattattttcggaaagtttacgtttattatgtgtgatttgattagtaggttaaaagtgaattgatgtagttttttcgtaataggttgtacggagtttaggagtttggtgagttggtagaagcgttttgagtaggatgtgggatttttttttttgtatgtaatgatacgatcgagttttttgatgtagtttattcgaagtttattaaagaatttttgattttttagtttatttattggaataatgttgaagagtagtagtgtttttatgtataggaatttttggggggtgatttggagttatttaaatttttgagagaggtgttttattcggatatattggttgtatattcgggatttgtgtatgcggtatttattgaaaattagattaggggcgaagtagagtattttggagttgatattggtgaaggatcgttagtttatggtaaatattatgagttttatttaggagtattgaatgatagttatttggtcgtttacgtgtaagttgcggaagttaggtaaggttttggtttatttgattacgtgtataagttgttttttttttagtttattgaggttagagagtaaggttgtaaaggagtcgggttggttgttgtcgtgtttagtatatattatatttggtttaatggtttttaggatatttagaaagatgggttgatatttatagtttttaatgtgtgatattgttagtttttgggttgtttttttagtggggttggtggtgttggaagtttttttttttttttgtagttttagattattaagtttttttagttttcgggtttttagagttatttttgttttataatattttcgaagacgataagatggataatttttttttcggaatttattaatagtgtaattatttttgttggcgtataggtatttttgtttttttttagcggtttttttgaagaagattttgtagtttttatatgtgagagttttatagtgatatttagaagttttatttttatagattaggtaggttttttggggtggaaagtaatagttaatgggtaaaatatggtttttggtagtttttaaacgtatgttttcgtaaggttcggagtagttatttatttaggggtttatttcgtttttgatataagtgggattgggatagggtattttgtttattatgtcgttagggtattatatattaggtgcggtgaagtcgtttttttggttcgttagtttttgagggggtcgagtgtagtcgtagggggttatagttttcgtttcgtcgtcgtcgtcgtcgtcgtcgtcgtcgtcgtcgtcgtcgtcgtcgtcgtcgtcgtcgttattattatttttattattattatacggtttatataattggtttttttcggttgtgaagagagtgtgttaggatgaggaagcggcggttgagggtgatttagaatcgggtttcgttgtattcgcgttatgtaggttcgttaggtttttatagcggtattgcgtcgtcgtagtcgtttaggcgttgtcgtagtttagcgggttttttagtttgatgcgagcgtggggatggggaggcggcggagggggcggcggttcggttagagttagtggaaagttgtagtagtcgcgattttggtacgtagttgtttcgtttagtgtttcggatttgtagagagatagggtagacggtagtttaagtgtttcggagttttttgttgtagcgttgttagagtagtttaggttttcgttttttagttttttggtgtaattttttttgaaaggggaatatttagtagtatttttagtgtttttgtttgcgttgtcgtttagtagagaatttttgtattcggttaatggggtataaggagtgggacgtatagcgggtggaatttttaaaagtggggcgtatatgtaattttttcgaagttgtttttttggatttagatgttttaacgtttttatatttaggtttatggatatcgatattgttttatataattttttggcgttgttagaaatggtcgaagtgttttttaagtaattgtttttggaggaagtgggagttttcgaggtttttttcgttttttcgttgttgttgttttcggatattgttttttgttgttgttgttgaaggagttgtatggtgttggtttcgtttaggatgtttttaaggttagcggagtagttgtttaagtcggggaaagtggggtttagtagggataacgtggatggggtagttgagttattttcgttcggaggtgttggtagttgttgcggtagttttttgttggcggttacggcggttttaggttttgggacgtaatttttttcggggtggtattttagggtcgattgcggttgtgaaggttgttgttttttatttaggattaggtagtttgtggggtttttacgatgggtttggggagaattatttttattttgttgttgttgttgttgtttggggttagttttttgttgttgttgttgttgttgttgttgttgttgttgttgttgttgttgttgtagtagtagtaaattggcgtcgggaggtgttgcgttcgcggtttttgggtgtttggggttcgggttttggattatttcgcgtacgttttggaatagattttggaaagtttttcggtaggttttggacggcggtcgagggtagattttttttagttttaattgtatttttatttttgagtttggttgaattttttatttattttttttatttcgttttttttttttttgtttagaagagtttaataggttgtgatgatgcggtagtcgttgtagttagttgtttatttgcgggaagttttagagaaggaaatttgcgggagtaattacgtaaaaagcgttttgatagttttaaagtttcgtgtagaagaagatatacggtggataagatttgttttgttaggtttatagtttgttttttaatatttgaagggtagatttaaaagatgtttagattttaaaagaaaaaaataaaattttttattttttaaatttagtgtttattgaagtaggtgtaaataagaattgagttattattttttttttttatttcggtttttttgtttttgtttgttttgttttttggttattgaagatttgattgtttttttattttttgatttttgtttcgtattcggggtggggaaggtaggaggaggtggagagagagtgggggaaaatagagggtttttttcgtcggaattt

SEQ ID NO: 101 - DNA, 12000 bp, Artificial Sequence
  chemically treated genomic DNA (Homo sapiens)
tttttattaagttttagggtttttcgtggttgttgggagttgtagtttgaacgtttttattttggcgagaagcgtttacgttttttttatcgagtttcgcggtaatttttaaagtatttgtatcgttttttcgtcgtttgtagagggcgtagtaggttttgtattttttttgtattttattttttaggttttagatttgttttttttatttaaaaaatatttattatcgagtttttatttgttatttagtattgatataggtatttaggaatataataatgaataagatagtagaaaaattttatatttttataaggtttacgtttttatgtattgaaagtaatgaataaataaattttattagagtgataagggttgtgaaggagattaaataagatggtgtgatataaagtatttgggagaaaacgttagggtgtggatattacggaaagtttttttaaaaaatgatatttaattgatgagaagaaaggatttagttgagagtaaacgtaaaagtttttttttttttattttttatatttgatataatgtaggatttttttaaaatgatttttattaattttgtttttatagttttggtttgtagaattttttattttaaaatgttagtatttacggtattaggtcggcgagaattttgattttgtatttttttttttaattttattttttttgtttttttcggtaggcggattatttgtttttatttgttatggcgattgtttagttttgtgttaggagtttcgtaggggttgatgggattggggttttttttttttatgtgtttaagattggcgttaaaagttttgagttttttaaaagtttagagttatcgtttagggagtaggtagttgttgggtttcggggatattttgcgttcgggttgggagcgtgttttttacgacggtgatacgtttttttggattgggtaagtttttgattgaatttgatgagttttttttgagttacgggttttcggtttcgtgtatttttagttcgggaaaatcgttggggttgggggtggggtagtggggatttagcgagtttgggggtgagtgggatggaagtttggttagagggattattataggagttgtattgttgggagatttgggtgtagatgatggggatgttaggattattcgaatttaaagttgaacgtttaggtagaggagtggagttttggggaattttgagtcggtttaaagcgtatttttttgtatatttattcggtgttgggcgtagggaatttttgaaataaaagatgtataaagtattgaggtttgagatttttggatttcgaaatattgagaatttatagttgtatattttagagtttatggtattttagtgaaaattggggttttatttcgaaatgattatttgggggtgattcggggagtttaagttgttaaggttttataattttcggatttttgttttttttggagcgatttttttaggtagttttcggtttcgttagatggagaaaatttaattgaaggttgttagtcgtggaagtgagaagtgttaaattaggggtttgttcgttaggtcgaggaggatcgtcgtaatttgagaggttcggtagttttgttattgtttggttttatatttatatttttgttttttgtagtagtattttcggtttttttttgtcggagtagtttattatttattcgatgagaggggaggagagagagagaaaatgttttttaggtcggttttttttatttggtagagggaggttgttatttttcgtttgtatttttttttttggattatttagttatggtttttgtaaaggtaggggtatttgttttgatgtaaattttaatttttttttttttttgaatggtgtgttttatttttcgggtcgtttgtaatttaggcggacgttattatggcgtagatagggagggaaagaagtgtgtagaaggtaagttcggaggtatttttaagaatgagtatattttattttttcggagaaaaaaaaaaaagaatggtacgtttgagaatgaaattttgaaagagtgtaatgatgggtcgtttgataatttgtcgggaaaaataatttatttgttatttagttttgggttaggttattttagttttagacgtaggttgaacgtcgtgaagcggaaggggcgggttcgtaggcgttcgtgtggtttttcgtgtagttttcggttcgagtcggttttttttggtaggaggcggaattcgaatttatttttttcgttgttttattttttagttcgcggttgttttatttcgtagtttttttttatgtatttgtcgcgtatcggttattttgtgtcgtatttacgttattttttttttaaatcgaggtggtatttatatatagcgttagtgtatatagtaagtgtataggaagatgagttttggtttttaatcgtttcgtgatgtttattaagttatagattttttttatcgttttagaaacgttttattacgtttttttttagtcgattttcgattttatttttattttgatttttataattattttgtttgttggagaattttatatagaatggaattaggatgggcgttgtggtttacgtttgtattttggtttacgtttgtattttgggaggtcgaggcgggcggattatttgaggataggagttttagattagcgtggttaacgtggtgaattttcgtttttattaaaaaatataaaaattagttgggcgtggtgggtgtttgtaattttagttattcgggagggtgaggtaggagaatcgtttgaattcgggaggtagaggttgtagtgagttaagatcgtgttattatattttagtttgggcgataagaacgaaatttcgttttaaaaaaaaggggggaattatatattatgtgtttatttttgtcgggtttttgttttttaatgtattgtttgatattcgtttatgttgtatatattagtattttgtttttttttatttagtatagtttatcgattgtatattcgtttttttgatggttttttgagttgttttttatttgcggttatgaaataaagttgttataaatatttttgtataattttttttgtgattatatgttttcgtgttttttggagaaatatttaggaggggaattgtggaggaagtaaaaagtagttgtattttgaatttttttagaagttttgagttttttagagcggttgtattattttatattttaattagtaaggtatgggagttattatggttgtgttatagtttttcggatattaggtatgttagtttttttaatgtggtatatttttgtggttgtaatttatagttttttattgattaaggatgtttagtatttttttatgtgtttattggttattcgtattttgtttgtaaagtagtttttcgagttttttatttgttattttggtttttttgtttgtttttattgtttagttgtgggattgttttatattttttggatataagtttttattagatttatgagtcgtgaatgtttttttttgatttgttgcgggtttatttgtttgttttatagagtttatagaattttaagaggagtggattaattttttttatgtttagtatttgttttgttttgtttaggatatttttttttttttttttaattttagggttatgaagatataattttatatttttttttaggatttttatggtggtaagttttatagtaaggtttttaagttattaattaatttttaaaattaattgtttatggtgtgaggtgtaggagttagtttttggtattttttttgtatggaaatttagttattttgtttttatttgttgaaataggttttttttttttattgaatgtttttaattttaattattttatagttggagtatagggttattattttagtgttattttttttttttttttgttaatttttgagatagggatttatattgttgtttaggttagagtataatggtataattaaggtttattgtagtttcgaatttttgggtttaagtagttttttagtagttttacgagtagttgggattattttattatatttagttaattattttatttttttgtattgataggattttattatgttgtttaggttggttttaaattgttggttttaagtttttattttatttcggttttttaaagtgttgggattataggtgtgagttattatgtttgattttttagtgttattttttatttattttttttgttttttgttttttttaaacgttggaggaagaaatagtatttattttatataaattttttagaaaatagaggaatagattgggcgcggtggtttatatttgtaattttagtattttggtacgttgaggtaggggattatttgaggtcgggagttcgagattagtttggttaatacggcgaaattttatttttattaaaatataaaagtagttaggcgtgtattatatttgtaatgttagttatttaggaggttgaggtataagaattttttgaatttgggaagcggaggttgtagtgagtcgagattgcgttattgtattttagtttgggtaatagagtgagattttgttttagaaaaaaaaagaaagaaagaaaaaatagaggaatattttttaatttgttttcgaagttaggataattttggtattaaaattaaataaggatattataagaaaagaaaatatagattaatatttttgttagtatagatatgtaatagttaattaattttagtaaattaaatttggtaatatagaaaaaaggataaataggttagtcgcggtggtttacgtttgtaattttagtattttgggaggttgaggtaggtagattatttgaggttaggagtttgagattagtttgattaatatggtgaaatttcgtttttaataaaaatataaaaattaggttgggtacggtggtttacgtttgtaattttagtattttgggaggtcgaggtgggtagattacgaggttaggagtttaagattagtttgattaatgtggtgaaacgttatttttattaaaaatacgaaaattagtcggtgtggtggtatttgtttgtaattttagttatttaggaggttgaggtagaattgtttgaattcgggaggtagaggttgtagtgagttaagatcgtgttattgtattttagtttgggcgatagagtaagattttattttaaaaaaaaaaaaaattagttgggtatggtggtgggtatttgaaattttagttattcgggagtttgaggtaggagaatcgtttgaatttaggaggtagaagttgtattgagttgggattatattattgtattttagtttgggtaatagagtgagattttattttaaaaaaagaaaaagaaaaaggataaatatattttaattaaataatgtttattttatgattgtagttgatttaatatttaaaaattggtttggtgtagtagtttaggtttgtaattttaatattttaggaggttgaggtaggaagattttttgagtttaggattttaagattagtttgggtaatatagttagattggtttttattggggggaaaaaaattagtttgtgtaatttattatattaataaagggaaatataaaaattttatgattattttaatagatgtagtaaaagtagttaatgatattaatatatatgtatgattataaattaattaattttttagtaaattagggaaaggaaatttaattagtttgataatagggcgtttatagtcggagttttattagtagtatatataatggtagaaaatttagtgttgttgggggcggtggtttacgtttgtaatgttagcgttttgggaggtttaggcgggcggattacgaggttaggagatcgagattgttttgattagtatgttgaaatttcgtttttattaaaaatataaaaataaaaaattagtcgggtatggtggcgggcgtttatagtgttagttattcgggaggttgaggcgagagaatggcgtgaattcgggaggcggagtttgtagagtttagatcgtgttattgtattttagtttgggtgatagagtgagatttcgttttaaaaaaaaaaaaaaaaaaaaaagaaaagaaaatttaacgtttttttttttaagattaggaattagaaaaggatttgatttttataacgttgatattatattggaggttttaattaggtaagaaaaagaaataatgagggtcgggtgcggtggtttaggtttgtaattttagtattttgggaagtcgagacgggtggattacgaggttaggagatcgagttattttggttaatacggtgaaattttgtttttattaaatatataaaaaattagtcgggcgtggtggcgggcgtttgtagttttagttattcgggaggttgaggtaggagaatggcgtgaatttagggggcggagtttgtagtgagttgagatcgagttattgtattttagtttgggcgatagagtaagattgtgttttaaaaaaaaaaaaagaaaaagaaataatgattagtggttcgatgttttacgttagtaattttagtattttgggaggtcgaggtgggtagattatttgaggtttggagttggagattagtttgataaagatggtgaaatttcgtttttattaaaatattaaaaaaatagttaggcgttggtcgggtatagtggtttatgtttgtaattttagtattttgggaggtcgaggtgggtggattatttgaggttaggagtttaatattagtttggttaatatggtgaaattttatttttattaaaaatataaaattagtcgggcgtagtggcgggcgtttgtaattttagttatttgggaggtttaggtaggagaatcgtttgaatttgggaggcggaggttgtagtgagtcgagattgtattattgtattttagtttgggtgataaaagtaaaaatttcgttttaaaaaaaaaagaattagttaggggtagtggtgaacgtttgtagttttagttatttaggaggtagaggtaggagaattatttgaatttcggaggtagaggttgtagtgagtcgagattgttttattgtattttagtttaggcgagaagagtaaaattttatgttaaaaaaaaaaaaaaaaaaggaaagaaaaaaaataacgattagaaaggaagaaattaaatatatttatagttagtatgattttatatatattatggttttaatggggttaggcgtggtggtttatgttgtaattttagtatttttaggaggttgaggtaggtggtttttttgggattagttggttaatatggtgaaattttaattttaataaaaatataaaaaattagttaggcgtggtgagggtatttttaattttagttatttaggaggttgaggtaggagaattgtttggatttgggaggtagaggttgtagtgagtcgagatcgcgttattgtattttagtttgggtaataagagtgaaatttcggtagggtgtggttttacgtttgtaattttagtatttcgggaggttgagttaggtcgattatttgaggttaggagtttgagattaatttaatatggtgaaatttcgtttttattaaaaatataagaattagttgggtgtagtggtgggcgtttgtaattttagttatttgggaggttgagatagaagaattgtttgaatttaggaggtggaggttgtagtgagttgagattatgttattgtatattacgtcgggtaatagagcgagatttcgttttaaaaaaaaaaaaaagatgaaattttattttaaaaaaaaaaaaaagttttaatggaaaatttataaaaagttattaaaattaataaataaatatagtagggttgtaggttatagggtaatatagttatttttttatttgtaggggtttggttttgggattttttatatattaaatttatagatgtttaagttttatatataagacggaatagtatttaatttatatatatttttttatatagtttaaattatttagattatttatattatttttatataatgaaaatgttaatgtatatgtaagtatgtatgtaagtatttgtattatattgtttagggaattattggatagataggtttttaagattgatattagtagttattgttaagattttggttaggtttgtttttgtttggggttttagttgattttattgtttttttatttagttaagggtatttgtattttttttggttttttggttatttggaaggtttagtttagtttggtatatttgtattttggtttattgatgttggtatttttgggaaggttttgttttgaaaaatacggagattttagttgttattgaagatttgagagataaagatagggagatttgtttgtagatttgtgtttttttaagtgggattgagattttgggttttttattttaggatagtattttttggtttgttgattgaatagatttttgaaggaggtgtagttgtattttaggagtgggggtgggagtagtattattgattcgtattaataattatatagttttttttagaataataatatagaataagtgaaatagaataattgtagaaagagttaatttttgttgagtttttattgtgtgtttagtattttttttaattttatattttttataatatatagagtattaggtaggcggggtttgggggtttacgtttgtaattttagtattttaggaggttaaggggggtggattatttgaggtcgggagtttaagattagtttgattaatatggtgaaatttcgtttttattagaagtataaaattagttaggtgtggtggtatatgtttgtagttttagttatttagtaggttgaggtaggagaattatttgaattcgggaggaggttgtagtaagcggagatagtgttattgtattttagtttgggtaataagagttgagatttcgttttaaaataaaataaaataaaataaaataaaataaaataaaataaaaaaagaaaagagtttgttattaaaggagttgtttggtaggggatgttttgttagtgtaaataatagaaaagtgggttgggtatagtggtttatgtttgtaattttagtattttgggaggttaaggcgggcggattatttgaagttgggagtttaagattagtttgattaatatggagaaatttcgtttttattaaaaatataaaattagtcgggcgtagtggtcgatgtttgtaattttagttattcgggaggttgaggtaggagaatcgtttgaatttgggaggtagaggttgcggtgagtcgagatcgtattattgtattttagtttggacgagagtaaaattttgttttaaaaaaaaaaaaaaatagaaaagtgtaataaatatttatagtaggtatgttttttagtaaatttgatgataaatttggtataaagaaagagagtatttttgaaaaaaaaaaaaagaaaaagaaagagagtattttgtttgggtaatatagtgaaattttgtttttataaaaaaatttaaaaattggtcgggtgtagtggtttatatttgtaattttagtattttgggagtcggaggcgggaggattatttgaggttaggagttcgaaattagtttggttaatatggtaaaattttatttttattaaaaatataaaaaattaattaggcgtattggtgggcgtttgtaattttagttatttaggaagttgaggtaagaggatcgtttgatattgggaggtggaggttatagtgagtcgagattatattattgtattttagtttgggtgatagggcgagatttcgtttttaaaaaaaaaaagaaaaagaaaaagattaaaaaattagttaggtaggtttttgtggttttagttatttgggaggttgaggtaggagaattattgagtttaggagtggtaggttgtagtgagttatgattgtattattgtattttagtttgggttttaaagtaagattttgttttaaaagaaaaaagaaagaaagaaagaatatggcgggttaggtatagtggtttatatttgtaattttagcgttttgagaggtcgaggtaggtggattataaggttaggagttttatattagtttggttaatatggtgaaattttgtttttattaaaaatataaaaaattagtaggtagggtggtaggggtttgtaattttagttattcgggaggttgaggtaggagaattgtttgaaattagaaggtagaggttgtagtgagtttagattgtattattgtattttagtttgggcgaaaagagttaaattttattttaaaaaataaataaaaaaataaaataaaaaaaaatatggtagtttttgaaagtttgtttgggagaaggtgcgatgatggttgtataatttcgtgtaagatgttggtttatataggggttgttttttgttttttttcgtttttttaattttttatataataggtttgtgtgttatgtatatttattgagtttaagtaggtgtaaggtattgtgatttaatattttggttagtaagataataagatagattattgttttgtttttaggaagtgtatatgttattagaggaaatagataaaataaataaggaaaagtattagataatgtaagtgttatgagaatgtaaatgaggtgatgtgaattaaaataggatgatttaagtttgtacggaaggtttttatttttatgtttttggttagttaaggaattattagttgattagtagagaagggtagttcgtttagttagagtttttggggaagagggagtggttgttaagagatgagattaaagaagtcgagacgggtttttcgtgagggggggttgtaatgtagggttgaggagtgttcgaagagaatgggtaggtgagcggtgagatagttgtttttttagaagttttgtagtgaaaggaattaaagaaatggagtcgtgtattaggtggggaagggtgggggttaagggggtgtttttttttatatagagattgtaggttgagaatgattatatttttgttaataggaggtgggagtagggtacggtagtttatatttgtaattttggtattttaggaggcggaggcgggtcgattatttgaagtaaggagttcgagattagtttggttaatatgtaaagttttgtttttattaaaaatataaaaattagttgggtgtggtggtattcgtttgtaattttagttattcgggagattgaggtaggagaatggtttgaattcggaaggtagaggttgtagtgagttgagattatgttattgtgttttagtttaggtgatagagagagattttattttaaaaaaaaaaaaaaatataggaagggagttgggaatagggtgtatatttaggaagttttggggatttagtggtgggaaggttggaagtttttttttgattgttttttttttaaagaagtgtatggttggtgtggggtggggtaggagtgtttgggttgtggtgaaatattggaagagagaatgtgaagtagttattttttttttgttttataggaagtcgagttgttttagatattggtatggtgttgggggaggggtttttttttttgtaggtttaggtgatttagggttggaagcgttttatgttggatttttatttttttttttgtagtagttagattgtttttcgggttattgttatggaggagtcgtagttagattttagcgtcgagttttttttgagttaggaaatatttttagatttatggaaattgtgagtggatttattggaagggtaggttattatttcgattttaattttagttttttagtagagatttgtgggaagcgaaaatttatgggattgattttttgtttttgttttttagattttttgaaaataacgttttggtaaggataagggttgggttgggatttggagggttgggggggttggggggttgaggatttggttttttgattg

SEQ ID NO: 102 - DNA, 12000 bp, Artificial Sequence
  chemically treated genomic DNA (Homo sapiens)
tagttagaggattaggtttttagttttttagtttttttagttttttaggttttagtttaatttttgtttttattagaacgttgtttttaggaagtttgaaagataagagtagaaagttagttttatgaattttcgttttttataggtttttgttagggggttggggttggggtcggggtggtggtttgtttttttaatggatttatttatagtttttataggtttgaaaatgttttttgatttagagggggttcgacgttaggatttgattgcggtttttttatggtagtgattcggaaggtagtttggttgttgtaagaggaaaagtggggatttagtatgagacgtttttaattttgggttatttgggtttgtagaggaggaggttttttttttaatattatgttagtgtttgagatagttcggttttttgtggagtaggaaaagaatggttgttttatatttttttttttaatgttttattataatttaagtatttttgttttattttatattagttatgtatttttttgaggaaaagataattagagagggatttttaatttttttattattaaatttttaagattttttaaatgtgtattttatttttaattttttttttgtatttttttttttttttgagatggagtttttttttgttatttaggttggagtatagtggtatgattttagtttattgtaatttttatttttcgggtttaagttatttttttgttttagtttttcgagtagttgggattataggcgagtattattatatttagttaatttttgtatttttagtagagatagggttttgtatgttggttaggttggtttcgaattttttattttaggtgatcggttcgttttcgttttttaaagtgttaagattataggtgtgagttatcgtgttttgtttttattttttgttaataaggatatagttatttttagtttgtaatttttgtatggggaaggatatttttttggtttttatttttttttatttgatatacggttttatttttttgattttttttattgtaaagtttttggaagaataattgttttatcgtttatttgtttatttttttcggatattttttagttttgtattataatttttttttacgaagggttcgtttcggtttttttaattttattttttaataattatttttttttttttaaaagttttagttagacgggttgtttttttttgttaattaattggtggttttttggttagttaggaatatgggggtaggggtttttcgtgtagatttaagttattttattttaatttatattattttatttgtatttttatagtatttatattgtttgatatttttttttgtttattttatttgttttttttaatagtatatatattttttaagggtagggtagtgatttattttgttgttttgttgattaaagtattagattataatgttttgtatttgtttgggtttaataaatgtgtataatatataagtttgttatatgagaggttaagagagcgagaaagagtaaggggtagtttttgtgtggattagtattttgtacgaagttatgtaattattatcgtatttttttttagataagtttttaaaggttgttatgtttttttttgttttgtttttttgtttgttttttgagatggagtttggtttttttcgtttaggttggagtgtagtggtgtagtttaggtttattgtaatttttgttttttggttttaagtaatttttttgttttagtttttcgagtagttgggattataggtttttattattttgtttgttgattttttgtatttttagtagagatagggttttattatgttggttaggttggtgtggaatttttgattttgtgatttatttgtttcggttttttaaagcgttgggattataggtgtgagttattgtgtttggttcgttatgttttttttttttttttttttttttttgaggtagggttttgttttgaagtttaagttagggtatagtggtgtaattatggtttattatagtttgttatttttgggtttagtgatttttttgttttagttttttaagtagttgggattatagaggtttgtttggttaattttttagtttttttttttttttttttttttttggagacggagtttcgttttgttatttaggttagagtgtagtggtgtgatttcgatttattgtaatttttattttttagtattaagcgatttttttgttttaattttttgagtagttgggattataggcgtttattaatgcgtttgattaattttttgtatttttagtagagatggggttttgttatgttggttaggttggtttcgaatttttgattttaggtgattttttcgttttcgatttttaaagtgttgggattataggtgtgagttattgtattcggttaatttttgagtttttttgtagaggtagggttttattatgttgtttaggtaggatgtttttttttttttttttttttttttttttagggatgttttttttttttatgttaaatttgttattagatttgttaagaaatatgtttattgtaagtgtttgttatatttttttgtttttttttttttttgagatagagttttgttttcgtttaggttggagtgtaatggtgcgatttcggtttatcgtaatttttgttttttaggtttaagcgatttttttgttttagtttttcgagtagttgggattataggtatcggttattgcgttcggttaattttgtatttttagtagagacggggtttttttatattggttaggttggttttgaatttttaattttaggtgattcgttcgttttggttttttaaagtgttgggattataggtatgaattattgtgtttagtttatttttttgttgtttgtattgataaaatattttttattaaatagtttttttaatggtaggtttttttttttttttattttattttattttattttattttattttattttattttgagacggagttttagtttttattgtttaggttggagtatagtggtattattttcgtttattgtaattttttttcggatttaaatgatttttttgttttagtttgttgagtagttaggattataagtatgtgttattatatttggttaattttgtatttttagtagagacggggttttattatgttagttaggttggttttgaattttcgattttaggtgatttattttttttggttttttaaagtgttgggattataggcgtgagtttttaagtttcgtttatttagtattttatgtattatgggaaatgtagagttgaggaaagtgttgggtatatagtaagagtttaataaaggttagttttttttgtaattgttttattttatttgttttatattattattttagagagaattgtgtgattgttagtgcggattagtggtattgtttttatttttatttttaaaatgtaattatattttttttagggatttatttagttaataggttaggaggtgttgttttgaaatggggggtttaaagttttaattttatttggagggatataggtttatagataggtttttttgtttttattttttaaatttttagtagtaattaaaattttcgtgttttttagagtaggatttttttaggggtattagtattagtgggttaggatataaatgtgttaggttgaattaggttttttaaatggttagggagttaagagaaatgtaggtgtttttggttgggtgggaaggtaatgagattaattgagattttaaataggggtaggtttgattagaattttaatagtggttgttggtattagttttgaaggtttatttgtttagtgattttttaaataatatagtataagtatttatatatatatttgtatgtatattagtatttttattgtatgggggtaatgtaagtaatttagataatttaaattatatgggaggatatgtgtaggttaaatattatttcgttttatatatgggatttagatatttgtgggtttggtgtgtgaggagttttagaattaagtttttatagatagagggataattatattgttttgtaatttgtaattttgttatatttatttattagttttggtagttttttatggattttttattaggatttttttttttttttgagatagagttttattttttttttttttttgagacggaatttcgttttgttgttcggcgtggtgtgtaatggtatgattttagtttattgtaatttttattttttgggtttaagtaatttttttgttttagttttttaagtagttgggattataggcgtttattattatatttagttaatttttgtatttttagtagagacggggttttattatgttaggttggttttaaatttttgattttaggtgatcggtttggtttagtttttcgaagtgttgggattataggcgtaagattatattttgtcggagttttatttttgttgtttaggttggagtgtaatagcgcgatttcggtttattgtaatttttgttttttaggtttaagtaatttttttgttttagttttttgagtagttgggattagaggtgtttttattacgtttggttgattttttgtatttttattagagttggggttttattatgttggttagttggttttagggaagttatttgttttagttttttaaaagtgttaggattatagtatgagttattacgtttggttttattaggattatggtatgtatagaattatattggttgtgaatgtgtttgatttttttttttttaatcgttattttttttttttttttttttttttttttttttgatatggaattttgtttttttcgtttaggttggagtgtaatgggataatttcggtttattgtaatttttgttttcggggtttaagtgatttttttgtttttgttttttgagtagttgggattataggcgtttattattatttttggttaatttttttttttttgagacggagtttttgtttttgttatttaggttggagtgtaatggtgtaatttcggtttattataattttcgttttttaggtttaagcgatttttttgtttaagttttttaagtagttgggattataggcgttcgttattacgttcggttaattttgtatttttagtagagatggggttttattatgttggttaggttggtgttgaatttttgattttaggtgatttatttatttcggttttttaaagtgttggggttataggtatgagttattgtattcggttaacgtttggttatttttttaatattttaatagagacgaggttttattatttttgttaggttggtttttaattttagattttaggtgatttgtttatttcggttttttaaagtgttgggattattggcgtgagatatcgggttattaattattatttttttttttttttttttttttgagatatagttttgttttgtcgtttaggttggagtgtagtggttcgattttagtttattgtaagtttcgttttttgagtttacgttatttttttgttttagtttttcgagtagttgggattataggcgttcgttattacgttcggttaattttttgtatatttagtagagatagggttttatcgtgttagttaggatggttcgattttttgatttcgtgatttattcgtttcggttttttaaagtgttgggattataggtttgagttatcgtattcggtttttattattttttttttttgtttggttaaaatttttagtatggtattaacgttgtgagagttaaatttttttttagtttttgattttagaggaaaaagcgttgagttttttttttttttttttttttttttttttttgagacgaagttttattttgttatttaggttggagtgtagtggtacgatttaggttttgtaagtttcgtttttcgggtttacgttattttttcgttttagtttttcgagtagttggtattataggcgttcgttattatgttcggttaattttttgtttttgtatttttagtagagacggggttttagtatgttagttaggatagtttcgattttttgatttcgtgattcgttcgtttaggttttttaaagcgttggtattataggcgtgagttatcgtttttagtagtattgagttttttattattatgtatgttgttagtggaatttcgattgtggacgttttgttattaaattagttaagttttttttttttagtttgttaggaggttggttggtttgtaattatgtatatgtgttgatattattaattgtttttgttatatttgttgaaatgattatagggtttttatgtttttttttgttaatgtggtgaattatatagattgatttttttttttttagtaaagattagtttgattatgttgtttaggttggttttgaaattttgggtttaagagatttttttgttttagttttttaaaatgttgggattataggtttgagttattgtattaggttaatttttgaatgttgaattagttataattatgagataaatattatttggttagaatgtatttattttttttttttttttttttttgagatggagttttattttgttgtttaggttggagtgtaatggtgtgattttagtttagtgtaatttttgttttttgggtttaagcgatttttttgttttagattttcgagtagttgggattttaggtgtttattattatgtttagttaattttttttttttttgagatgaagttttgttttgtcgtttaggttggagtgtagtggtacgattttggtttattgtaatttttgtttttcgggtttaagtaattttgttttagttttttgagtagttgggattataggtaggtgttattatatcggttgattttcgtatttttagtagagatggcgttttattatattggttaggttggttttgaatttttgatttcgtgatttgtttatttcggttttttaaagtgttgggattataggcgtgagttatcgtgtttagtttgatttttgtatttttattagaaacggggttttattatgttggttaggttggttttaaatttttgattttaagtgatttgtttgttttagttttttaaagtgttgggattataggcgtgagttatcgcgattggtttatttatttttttttttatattattaggtttggtttgttaaaattggttagttgttgtatgtttatgttaataggaatattggtttatattttttttttttataatgtttttgtttggttttggtattaggattattttggtttcgaaaataagttgggaaatatttttttattttttttttttttttttttttttttgagatagggttttattttgttgtttaggttggagtgtagtggcgtaatttcggtttattgtaattttcgttttttaggtttaagggatttttgtgttttagttttttgagtaattggtattataggtatggtgtacgtttagttatttttgtattttagtagagatggggtttcgtcgtgttggttaggttggtttcgaattttcgattttaaatgattttttgttttagcgtattaaagtgttgagattataggtatgagttatcgcgtttagtttgtttttttgttttttgaagagtttgtgtaagatgggtattgtttttttttttaacgtttaaagagagtagagaatagaggagataaatagaaaatagtattaagaggttaggtatggtggtttatatttgtaattttagtattttgggaggtcgagatgggatgaaagtttgaggttagtagtttgagattagtttgggtaatatagtgagattttgttaatataaaaaaataaaatagttagttgggtgtggtggagtaattttagttattcgtgaggttgttagaggattgtttgagtttaggggttcgaggttgtagtaagttttgattgtgttattgtattttagtttgggtaatagtgtgagtttttgttttaaaaattaataaagaaaaaaagaaaatagtattaaaatggtagttttatattttaattgtaaaataattaaaattaaaagtatttagtagagaaaggaagtttattttaataagtggagatagaataattggatttttatataggaaagatattagagattgatttttatattttatattataaataattaattttaagaattaattaatggtttaaggattttattgtaaaatttattattataaaggttttaaaagaaaatgtaagattatatttttatgattttggggttaaaaaaaaaaaaaaagatgttttaaataggataaggtaaatattgaatataaaaaagattaatttattttttttaagattttgtaaattttgtaaagtaaataaataggttcgtaatagattagaagaaaatatttacgatttatggatttgataaggatttgtatttagaaagtataaagtagttttataattgaataataaaaataaataaaaaaattaaaataataggtaaaagattcgaagagttattttataaataaaatacgaatggttaataggtatatgaaaaaatgttgaatatttttagttaatagagaattgtaaattataattataaggatatattatattagaaagattgatatatttaatgttcggaaggttgtggtataattataataatttttatattttgttagttggagtgtaaaatggtataatcgttttggaaaatttagagtttttgaaaaagtttaaaatatagttattttttattttttttataattttttttttaagtatttttttaagaaatacgaaaatatatgattataaaaagaattgtataagaatgtttatagtagttttattttataatcgtaaatgggaaataatttaaaaggttattaaaaggacggatatataatcgatggattatattaaatgaaaaggagtaaaatattgatatatataatatgaacgaatgttagatagtatattgaaggatagaagttcgataaaaatgagtatataatgtatgattttttttttttttttgagacggagtttcgtttttgtcgtttaggttggagtgtagtggtacgattttggtttattgtaatttttgtttttcgggtttaagcgatttttttgttttattttttcgaatagttgggattataggtatttattacgtttagttaatttttgtattttttagtagagacggggatttattacgttggttacgttggtttggaatttttatttttaagtaattcgttcgtttcggttttttaaagtgtaggcgtgagttaaagtgtaggcgtgagttatagcgtttattttgattttattttatatgaagttttttaataggtaaaatggttatggagattaaaataaaggtggggtcgggaatcgattgggaagagacgtgatgaaacgtttttgggacgatgaaaagggtttgtgatttggtaggtattacggagcggttaggggttaaaatttatttttttgtgtatttgttgtgtgtattggcgttgtgtgtaaatgttatttcgatttaggaaaaagatgacgtaagtacggtataaagtggtcggtacgcggtaggtgtatgggaagaaattgcggaatgaaataatcgcgagttaagagatggggtagcgggagaaatgaattcgagtttcgttttttattaggaagaatcggttcgggtcgagggttgtacggaggattatacggacgtttgcgggttcgtttttttcgttttacgacgtttagtttgcgtttggaattggaatggtttagtttaaagttagataataggtagattgtttttttcgataaattattaaacgatttattattgtatttttttaaaattttatttttagacgtattattttttttttttttttttcgggaagatgagatatgtttatttttgaaagtgttttcgggtttgttttttgtatatttttttttttttttgtttacgttatggtagcgttcgtttaggttgtaggcgattcggggggtggggtatattatttaaagaaggggagggattgaggtttgtattaaaataaatatttttgtttttgtaaaggttataattaagtaatttagaaaaagaaatgtaggcggagaatagtagtttttttttgttaagtaagaggaatcggtttaaaggatatttttttttttttttttttttttttatcgggtgaatagtgagttgtttcggtaaaaagaaatcggaaatgttgttgtaagaggtagaaatgtaaatgtggagttaaataataatagggttgtcgggttttttagattgcgacggtttttttcggtttggcgggtaaatttttggtttagtattttttatttttacgattgatagtttttaattggattttttttatttagcggagtcgggggttgtttggaaagatcgttttaggaaggataaaggttcggaagttgtgggattttagtagtttgggtttttcggattatttttaaatgattatttcggaatggagttttagtttttattaggatgttatgggttttaaaatatatagttatgagtttttaatgtttcgagatttaaaagttttagattttaatgttttgtgtattttttattttagggattttttacgtttagtatcgggtggatgtgtaaagaagtacgttttaggtcggtttaaggttttttaaagttttatttttttgtttaggcgtttaattttgagttcggatggttttaatatttttattatttatatttaggttttttaataatgtaatttttatgatgatttttttagttaagtttttattttatttatttttaaattcgttaagtttttattgttttatttttagttttagcgattttttcgagttgaaaatatacggagtcgagagttcgtgatttagagaggatttattaagtttagttaggagtttatttaatttagggaagcgtgttatcgtcgtggaaagtacgtttttagttcgaacgtaaagtgttttcggagtttagtagttatttgttttttggacggtggttttagatttttgagaagtttaaaatttttagcgttagttttgagtatatgggaggggaaaattttaattttattaatttttgcgaggtttttggtataaagttggatagtcgttatgataagtaagggtaagtaattcgtttgtcggaggaagtaaaggaaatggagttggggaggagggtgtagagttaggattttcgtcgatttggtgtcgtagatattaatattttggggtggaaaattttgtaagttagagttgtgagggtagaattggtggaaattattttggaggaattttgtattgtgttaaatatgaagggtggaaggaagaaagtttttgcgtttgtttttagttggattttttttttttattagttaaatgttattttttaggaaggtttttcgtaatatttatattttaacgtttttttttagatattttatattatattattttatttaattttttttataatttttattattttgataagatttatttgtttattgtttttagtatatggaaacgtaagttttatgaggatatagaatttttttattattttatttattgttgtatttttgagtgtttatattagtgttgggtagtaagtaagagttcgataataaatattttttgaatgagggagataggtttgaagtttggagaatgagatgtagaagaggtgtaagatttgttgcgttttttgtaggcggcgggggggcggtgtaggtgttttaagaattatcgcgggattcggtagggggagcgtaggcgtttttcgttaagatagaagcgtttagattataatttttagtagttacgaggagttttagggtttgatgggaa

SEQ ID NO: 103 - DNA, 3001 bp, Artificial Sequence
  chemically treated genomic DNA (Homo sapiens)
ttgttataattgggtcggtaggggaagaagggaagggggatttggatgggttttcgtaaaataggtgaaaataaggggtgaagagtaggggattgaggaatagtaaaggaaaataaagatattatttttaatagaagagttggaggggggaaaaaaaaagtaagatttaattacgattttttttttatttttagtttttattttttttaaattaggaaatttttatttggaaagaaaaatagatataaaatataaaaacgaaaagtaaatataatagaatagaaaaagtagtattagggaaagtggttaggatagaggtttttaataagattagtaattatagtagcggaaattagaaaagttggaaggggaagattaatttataaatttttgatttgaaagtaatagtgaggaaatagaatagataataaaaggtaaaatatgattaataatttagtaaagtggaaaatggagatgataagtagagttttgaaaagtttttaaaggaagatttcgttttttttattataattttatcgttatggatgtttaatttagtagttattagttaagggtgatagatgagggttattattgcgtaaagcgtttatttttcgaaaagaaaatattatatggtcgtcgtttattttttatagtttttagttttttattttttagtattttttttttcgttgtttaagtaagttttgtgtaattagtatgggggggaggggcggtgtaagataaatggttcggttataaaaaaataaaatttatgtttttattttataataagaaagttaataggtgatagagaaaggtaattttcgtttaggttttaataggatttttattaagtggttttatattattgttacgttacgaaggtgagattttttttggagaaatatataatgatattaatcgtatcgtaaatatttggaaggtattttaaattaagttgggtaagttaaggtgagaaaaatttaattgggtttagaaattagtttttttttttagttttatcgagggtcgaaaaagagtttaagaaagaataaggaaggtgagaagagtttcgtttttcgtaaatattaagattaagggacgtcgagtatcgttttttattgatgttgaggtttttaatatgagaagaatttattggaagaagggagtaaaacgaatataatggcgtcgaggatattattttggattgggtttttttttagtttttttttttttttttaggagttttttgttttcgaaagggatgtaagttaaggaaatagcgaattaattaggttttagcgattagattatcgtttgtgaaaagggtattaggaatttatgtgacgggatgggtgcggagaagcgtagatggaaacggattgtagcgaaggttaaagtttatttaaatagggagagcgcgtatggcggtagtaatagcgacgaaggagggaaatttgtttttattttcggttgtaggtttttttttattttagtttttcgtttttttggttgtaagagcgtaggcgtaagggatcggaaatagggtttttcgcggttatatagattcgtgcgttttaggtttgtttttggaaaatgtttgtttgaaatttgttttaaaatcgtttttaattttattgttatcgttagtaataaaagatataaaggaaattaacgtttgttttttattgttatttttatttttttattttatttttttttatgttttttattttttcgtttaggtttttgttacgtaggttttttttgtaggtattttttcgtggatgcgcgaggaacgagtgtggcgaaggttgcgagtttttacggggtttttggttcggtagtgaaggtgatttgaggattgttgggtacgtattaggaatcggtaggttttagttgaggggagggaggagggaagttttagggaattggattgttcgggggtgtttttcgatttttttttagtcgtggggttggtgggcggtatttttttaaaaggatgttgttcgaggtagttgatgttttagggttagtgagttaggaaggtgttttgaattcgagcgggaagacggggtttggattcggttttaagtgttaatagtagggtttgagggttatattatattttattaatattgtttttgtttttgttttgagatagagtttcgttttgtcgtttaggcgggagtgtaatgttttgatttcggtttattgtaatcgttgtttttcgggtttaagcgatttttttgttttagtttttcgagtagttaggattataggcgttcgttattacgtttagtaaatttttgtttttttagtagagacggggttttatttatgtatgattttaggtgatttatttatttcggttttttagagtgttgggattataggcgtgagttatcgcgttcggtttattaatattgttaattcgagtagaatgtttttggtttcgttttaatagttttattgtttaatttggattttttttttgaatgaaatatttgttattttcgtttttgagatggggagttataaaagtaagatttgatgttttgttgtgtaataaaataataaacgtttggttttttttttgttagtatatttaattatttaatattaaggagtaggtatcgttatttttattttattgatagaagcgaagtaaagtaatatattttaagtagtacggttggtgaggttatagttaggatgtaaatattttttattttttattgtattttgtttttttgtttaaagaatttggttagtaaatatattgtaggttattttattggtttaaatttttggtgaagtaagtttgtttttagtgataaatgaagtaattaatttaagaatggtgttatagaaggtatttttttaagtattatttaatttatttaaaagtatttattaattgttttttttgtgttatatgttgttttaggatttggggatataacggtgaatagttttgtttttatagtgtttatat

SEQ ID NO: 104 - DNA, 3001 bp, Artificial Sequence
  chemically treated genomic DNA (Homo sapiens)
atgtaaatattgtgagaatagggttgtttatcgttgtgtttttagattttaggataatatgtggtataagggaggtagttgataaatatttttgaataaattaaatgatatttgggaaaatattttttatgatattatttttgaattagttattttatttgttattgaagataagtttattttattaagaatttgaattaataaggtaatttgtagtgtatttattaattagattttttgagtagggaggtagaatataatagagaatgagagatgtttgtattttggttgtaattttattagtcgtattgtttgagatatgttgttttgtttcgtttttgttaataagatgagaataacggtatttattttttagtattaaatgattaagtatgttaatagggagagggttaaacgtttgttgttttattatatagtaggatattaggttttatttttgtggttttttattttaaagacggggatagtaaatgttttatttaggaaaaaaatttaggttgaataatggggttgttggggcggggttaagaatattttgttcgaattaatagtattaatgggtcgggcgcggtggtttacgtttgtaattttagtattttgggaggtcgaagtgggtggattatttgaggttatatatgggtgaagtttcgtttttattaaaaaaataaaaatttgttgggcgtggtggcgggcgtttgtaattttagttattcgggaggttgaggtaggagaatcgtttgaattcgggaagtagcggttgtagtgagtcgagattaggatattgtattttcgtttgggcgatagggcgagattttgttttaaaataaaaataaaaatagtattaatggaatgtagtataatttttaagttttattattaatatttggggtcgaatttagatttcgttttttcgttcggatttagaatatttttttgatttattggttttagggtattagttatttcggatagtatttttttgggaaaatatcgtttattagttttacgattgggaaagagtcgggaaatattttcgagtaatttagttttttgagattttttttttttttttttttagttagggtttgtcggtttttagtgcgtgtttagtagtttttaggttatttttattatcgggttaaggatttcgtgggaattcgtagttttcgttatattcgtttttcgcgtatttacggaggggtgtttatagagaagatttgcgtggtaaaaatttaaacgaagagatgaggggtatggagaggagtaggataagagaataaagataatagtggggggtagacgttagttttttttatattttttgttattggcggtagtagtgaagttagaaacggttttaaaataaattttagataggtattttttaaaggtaagtttggagcgtacggatttgtataatcgcggaaggttttgttttcggttttttgcgtttgcgtttttgtagttaagaaggcgggaggttggagtagagggaagtttgtaatcggaagtgaaggtagatttttttttttcgtcgttgttgttgtcgttatacgcgttttttttgtttaggtaagttttggttttcgttataattcgtttttatttgcgttttttcgtatttatttcgttatatgggtttttgatattttttttataggcgatggtttggtcgttggggtttagttggttcgttatttttttagtttgtatttttttcgagagtaaagagtttttgggggaaggaagggaagttaaggggggatttaatttaagatggtgttttcggcgttattgtgttcgttttgttttttttttttaatgggttttttttatattggaggttttagtattaatgagaggcggtgttcggcgttttttggttttggtatttgcggagggcggggttttttttattttttttgtttttttttgagttttttttcggttttcggtgggattgggaggaggagttggtttttgggtttagttggattttttttattttgatttgtttaatttaatttggagtgttttttaagtgtttacgatacgattggtgttattgtatgtttttttaaaaggagttttattttcgtagcgtaatagtgatgtgagattatttggtaaagattttgttaaagtttgggcggggattgtttttttttgttatttattagtttttttattgtagggtggagatatgaattttgtttttttgtggtcgagttatttgttttgtatcgttttttttttttatgttaattatataaggtttgtttaaatagcggaagggaggatattgagaagtgggaggttgagagttatgggaggtggacggcggttatatgatgtttttttttcgaaaggtgagcgttttgcgtagtgatgatttttatttattatttttgattgatggttgttgagttaggtatttataacggtgggattataatagggaaagcggagtttttttttgaggattttttaggattttatttgttatttttattttttattttattaagttattagttatattttattttttattatttattttatttttttattgttatttttagattaagaatttataagttggttttttttttttaatttttttggttttcgttattgtgattgttaattttgttgggaatttttgttttaattattttttttggtattgttttttttgttttgttatatttgtttttcgtttttatgttttgtatttgtttttttttttaggtaaaagttttttggtttagggaaagtgggaattggggatggaaaagaggtcgtgattaagttttgtttttttttttttttttttagtttttttgttagaaatagtatttttgtttttttttgttgttttttaattttttattttttattttttgtttttatttattttgcgagaatttatttagatttttttttttttttttttttgtcggtttagttatggtag

SEQ ID NO: 105 - DNA, 3001 bp, Artificial Sequence
  chemically treated genomic DNA (Homo sapiens)
gaagatgagggtttttggaaatttgagggaacgataaagattattttatttgggaagatcggtaggagtttttatgggggtttagaggggttgatatttatttttacgtttagggagttgtcgttaaattaaataagggaggatataagagggtaggagtgtgagaaaggatgagaaagtaggggtgattttagatgagttatggtttgtgaatgggtttaggttttgggtttattttttatttattaagggttagagaaaggttggggatataatatcgggatattttgtttcgggtaacggaagagttgcgtttgtttttcggttattttatttaggttagaatataaggtgttgtttgtaagaaatgttgagcgtcggggggtcgttcggtggttttagtttatagatcgtatataagttttcgttttattttttattggtttcgttcggttagatttatcgttcgtttatttgaaaagtgatataattagggcgttttagttttttttttttcgatttcggaataattcgacgttttagtagggagtagagtttttttttgatttttgtattttttttaatgtataacgagttttttgtttcgtttttttttagatggcggatttcgtatttgtttagattttttttttaggttttcgtttttttttcgcgtgttttagggatagtttgttatagttttttttttttttcggtgttttattttgtagattttagtttttcgggttaagtaggttgtcggtgaagaaacgcgtcgggttagtaatttcgttgagtagtattagtttcgttattttttttttttattttttaattaggagacggtttttaaggttcgtttttttttattattaattaattagttgatttttttaaaaaagggggcgtttcggaagttttatcgattagtaagagatttgggtgttgagtacgtgaattaatagatgcggatgattgtgtaggcgggtttaatgggagtatagtagtaggaagtaatttttagatagtgttatatcgttaagcgtatgcgttaaataggttttagtgataaagcgtttgggagatgtagtatttagtattaaggtttattattttttttagttattattaagtttagtttagatagtttttatgtgttttcggagatagataagttttttaaaaggggcgtattgtgattattgttattttttttaggaagttaaaagttgagaatgggatatgggttgaaattttttttttggttttttatttttaaattttatagtatagattataatttataagtttttgttttttttaaggtttaatttttaattagttaaatattttgcgtagattttgagttagttttgtattttggttttttttttgaatgattattttttttagttttttttgggttgttcggtttttgggatttatcgttagtatttttttgaggttagtagttgttttttttaggtttttaagggtagtttgggtaattttttttcggtataaggtttttaaatggttaggttttcgttttaatattcggttatagttttgggttgttaattgaggttgttttagtaataattgataggtagttagattggtatgaaggatagttcgttttggagggttaggtgggggtaaagttaggagtagtcgaagagttcgtttatagtatcgggtagtttttttagggtttttagttcgaaatagttttgtgttttttgtacgtttttttttggttagggtttttttttcgttagtttttagtttttaggagtttcggttttgagtgaaggatgttagtgtgagtttgataggaggtttagagtgtttaggtagttgaagttttgtttttttattttgatatatggattttaagtatttttttatgagttttttttaagttttttttttttatggttttacgtttatagttagttttgtttagttttttggcggttttgattcgaaaggaaattttaaagttagtattcggtagtaggagtttagtttgggtttgtttaagttatggttacggattacgatttttttgataaagtttttatcggggtagtattagagattagaagtttgaagggtttttggtatttgattggttgatttatgagatttatgagagttttttttaagtttagtaattagttttttagttttttgagtatgttttagaatttggttggttggatttgggtttatttttagtttaagcgtttcggtaggagggtttcggggttgttgtttaatttgaataattgaattaaggttttttcgaaggttttttttttatttttgttgcggttgagaggtgtttttttttttaattgtattgattggtggcgtttttatatggatgtttagttttttttacggtgagtgaatagttttggttagaaagggatgaattaggtttaggttagtatttgaaaagaaaattaaataatgttaatagtagggtttttatttagatttttttttcgtttttttttatttttttgagatttaggtttttagttttgaaagtttttagttttgtttttttttaaaaatttgttttagttttttcgttttatttatatataatttagaattataaattttataattttttgcggttaaggtagtcgcgttaattacggatattcggtcgggttaataagtatttgcgcggttaaagtgtttggtatggtgataggaggagtcgggttattcgaattatttttttttttaaagttaaatggttattgaatgttgttttcggagttttgttttacgcggagagggtagtcggagaggggcgcggtgcgggaggcgggggtagggggcggaataattgggaaagatattgataattaattttggagttcgcgagatttcgaatttagttaaatttttggtagttaatcgggagaagggaggaatttggttagttcgtttattgaacgtgatattatttttttcg

SEQ ID NO: 106 - DNA, 3001 bp, Artificial Sequence
  chemically treated genomic DNA (Homo sapiens)
cggaggaaatgatgttacgtttaataggcgggttaattagattttttttttttttcgattggttgttaggaatttgattagattcggagtttcgcgggttttagggttagttgttagtattttttttagttgtttcgttttttattttcgtttttcgtatcgcgttttttttcggttgtttttttcgcgtggggtaaggtttcgagggtagtatttagtagttatttagttttggaaggagaggtgattcgaatggttcggttttttttgttattatgttaggtattttggtcgcgtaggtatttattgattcgatcgggtgttcgtagttggcgcggttattttaatcgtagggaattgtggaatttatagttttaaattatatgtgggtggaacggggaagttggagtagatttttggaggaaagtaaaattggggatttttaggattaggggtttgggttttagaagaatgggaaaggacgagaaaggagtttaaataagaattttgttattagtattgtttggttttttttttaggtgttgatttgaatttggtttatttttttttgattaaaattgtttatttatcgtggaagggattaagtatttatatggagacgttattagttaatataattggagaaaaggatattttttagtcgtaataagagtgggaaaagaattttcgggagaattttgatttagttatttagattaggtagtagtttcgagatttttttatcgaaacgtttgagttggaagtaagtttagatttagttagttaaattttagagtatatttaaggagttgaaaaattggttgttgaatttgaaggagatttttataagttttatggattaattagttagatgttagaggttttttaagtttttgatttttggtattgtttcgatgggagttttgttaagaagatcgtaattcgtggttatggtttggataaatttaaattaggtttttgttgtcgggtattggttttggggttttttttcggattagggtcgttagagggttggatagagttaattatgggcgtagggttatggagggaggaaatttggggggagtttatagagaaatgtttggagtttatgtgttaaggtgaggaagtagagttttagttgtttgggtattttggattttttgttaggtttatattggtattttttatttaaggtcgagatttttgggagttggagattagcgagaaggaagttttggttagggaagaacgtgtaaggggtatagaattatttcgagttgggaattttgaaggagttgttcgatgttatggacgggtttttcggttgtttttgattttatttttatttggttttttagaacgaattgttttttatgttaatttggttgtttgttagttgttgttagggtagttttagttggtagtttagagttgtgatcgggtgttggagcgggagtttggttatttaaaggttttatatcgaaggggggttgtttaggttgtttttgggaatttggaaaaagtaattgttgattttaagaaggtgttggcgatagattttaaaaatcgggtagtttaggaggaattggggaaggtggttatttaggggaagaattaggatgtagggttggtttagggtttgcgtaagatgtttggttgattaaaagttaaattttaaaagagataggaatttgtgaattgtggtttgtgttgtgagatttgggggtggggggttagagggaaggttttagtttatattttatttttagtttttggttttttaggggaggtagtagtggttatagtgcgttttttttgaggggtttatttattttcgaggatatatagaagttgtttaaattaaatttagtagtggttgggggagatggtggattttaatattgggtattatattttttaggcgttttattattggagtttgtttggcgtatgcgtttggcggtatggtattgtttggaagttattttttgttgttgtgtttttattgggttcgtttatatagttattcgtatttgttgatttacgtgtttagtatttaggttttttattggtcggtagagttttcgggacgtttttttttttgaaagagttaattgattagttggtgatggggagaggcgggttttgggaatcgttttttggttggggggtgggggggaaagatggcggagttgatgttgtttagcgagattgttgattcgacgcgtttttttatcgataatttgtttagttcggaggattggggtttgtagagtgaggtatcggggaggggagagggttgtggtaaattgtttttgaggtacgcgggaaagaagcgggggtttaaagaggaagtttgggtaaatacggaattcgttatttgaaggagagcggagtagggggttcgttgtgtattaagggggatataaaagttagggaagaattttgttttttgttggaacgtcgagttgtttcggggtcggggaaggaggggttgaagcgttttggttgtattattttttaagtgggcgggcggtgggtttggtcgagcggagttaatgagggatggggcgggggtttgtgtgcgatttgtaggttggggttatcgaacgatttttcgacgtttagtattttttgtagatagtattttgtattttggtttagatgaagtggtcgaggagtagacgtagttttttcgttgttcggagtaggatgtttcggtattgtgtttttagtttttttttaatttttggtgggtggaaagtgagtttagaatttggatttatttataggttataatttatttggagttatttttatttttttatttttttttatatttttgtttttttgtatttttttttatttagtttgacggtagttttttggacgtggggatggatgttagtttttttgagtttttatgggaatttttgtcgatttttttaggtaaggtagtttttgtcgtttttttagatttttagaaatttttattttt

SEQ ID NO: 107 - DNA, 5477 bp, Artificial Sequence
  chemically treated genomic DNA (Homo sapiens)
tataaggattgtgggttttttaggggtttcgtgttaggagttagaaggggtatagattgtttttttttaatagttgtattatttgtttagagttagattgagtttggagggttttggaagttagaaggattgatatggggttggaggtagggaaaggttgttggaagagggagaaattgaggatttacggtttttaggtagtttgatttgttttaggtttggttggggtttgttttcgttataggtggttacggtttttttgtaagaattgttggggtttttattatagttgtagtatcgtattcggttttttggtaggagaaaagaggcgttggatttgggttttcggtggagtcggttggtagaaggtttgtgtgagaagttagttggtcgtttttttatttaaggtagtttttagtagggagttgagtaagattttaataaattggggttttatcgtagtttgttcgtgttaggatcgtttttattttttgtttatttttttttttagttcggttttgtttgttttatatttttcgtgttttgagttttatagggttataaaaaaggaagaaagagttttttttagtaggtattaagggttttagtggggatagggaggggttttatagtatgtttttagtattttttggagtttttaaatttttttatttttagtagtagtttgtggattaataagaatttttgaggatttttgatatttttttatagggtttttgagggttttttttttgtaattatttgtgtaaggttagattttttttatatattggattttaacgaaaataatatattttaatagattgaatgtagaagtagataggaaaatttaggtattttttacgaagtttgatattagatttataaaaatgtaaagtaatgtttagttttttattgtgttgtggagaaataatagttattttttataaaattgtattttgttagtatgtaatattttattatttttattgtttaaataaattaataaatatttattttaaattttttgttttaatttttaatgtagtaaatattgatataattttataaagaaaagttttttagagttttaagtaattttgaaaagtgtaaagaggttttgagattaatatttttgaaaagagttgtttttttgggtatttgtgttttttttatttttattttttgtttttagttttattttttttggtatatgttggttttgattttttagatgggttttttttttttttagtttttttaattttagttttttaggttgtattattatttttttattttaaattttatttatgtttttttttttagtgatttttttttagtgtaagtatattagtaggttttttagttttattcgtggttattttttttttttaaggtagtaaagttggtagggataattatagggtaggaatgttgaagtttggggggattaaagggatttgaagttgggtggggttcgtttttatatagttgggttttgtgtgtgtatgtgggtgtgtgggtgggggtattgttgattttatatttaaatagatttacgtcggggttgtttaggagggtgattttgagagatatgaaagtattgagggggaaagatagagaaaataaagatagagagaagttgagagagttagggagtagtttgagatatggggagggagggggaggagtaggagggaaggcgatagatataatttaggagtaggagaggaagttaagttatagagataatatgttgagagagtagaggagattttttaggtaagggtagattttttgtaggggtaggttgggggttttcgttgtttgttgggttaggttggtgaatttggttatggtttcgttttttagatttattttttaggtgtgtttgtttattggttttttattgttttgtttaaatgttttaattttataaatttcgggatttcggggtgtagattattttttttagatttttgagtttgtgtttggttatgggtatttttagtatttttttttgcgtgttgtttttttgtggggtattgggtaagggtgggttggggaatttttagtggttagggggttgggggtggggataagggtatgtggaggaatttgagggttggggaggagaggggtgtgggtgttggaagaggttaagaagagagttgggggagtgggggattttagggagattagttattgggaaggttagtttgatgaggtgggaaaggaagagtttttttttaaggtatttgagaataattgttttttttttgttgtatttttgattcgtttttgttttttttattttttattttacgtgttgtttttgtgttgggttttttggttaatgttaatttttatttttttatttgtttttggtgttatttatttaatttttttattgatttttttaatttttttgttgttgggtttggttttttgttttattttttttatgttggtttttgatttttgtggtttttgtttatgtttgcgtattttttaatttttgtattttttttgtttttatttttgtttttttttttgtatcgtttttttttttttttttgagatagagtttcgttttgttatttaggttggagtgtagtggtatgatttcggtttattgtaattttagttatttagatttaagagatttttttgttttagttttttaagtagttgggattagaggtatgtgttattatgttcggttaattttttgtatttttagtagagacggggttttattgtgttagttaggatggttttaattttttgattttatgattagttcgtttcggttttttaacgtgttgggattataggcgtgagttattgcgtttagttattttttttatttttgttagttttttttttttattttatagtttttttttttttgttttatgtgttatttttttttgtgattttttttcggatttggtttttgtttgttttatagggagggtttgttttttttgtttttttaatttttgttgttttaataggttttattatgttttttgttcggggaaggtttcgttgttatatttgtggttttattaaattttgttattttgtttttatcgagtgtcgggacgatgaagtttgtggtattagtattggtattttaggtaggattttggtttaatggtttttttttaggaggttttttatttttatttattcggttttttttgtggttttcgttttagtatgttttttttattttatagattagagtgagattattgagtgaaaaagttgttttttaagggtttagtgttttttgttaggttatgttatttattggttgtatttttatattttgtggtattattgttgcgagtaggatttgtgtaatatagtcgtttttttatagtagtttattagttttttcgtttttttgtttttttttgtggttagtttcgttgggagaggatattttttttattagttttcgtggatttgtagtttttaatttaggatatttttcgttattattgcggttttggaaatatttgtatagatattttgagatatgttcgagaatttaattttgtatagagattttagattttttagtagattttttatagattttttataaggtttggggaggtatttgtttagagtttaattttataaagaatatttattttgcgttttttgttttttttagatgtttattgttgatgtttcgtgttagtttaggttattggtaaggtaggtattttgatgatattgtggattttaggtaaggggattaaaggagtattaggtatggtaaggaggagagttttgttaggaaagattaatgtggtaggtcgggaatttaggatggagggtttgggggattatgaagagtatttttaataaaaggtttatttaggagtttagtaatattgtagatattgtagtgtgtgtgtgtgtgtgtgtgtgtgtgtgtgtgtgtgtgtttgtgtgtgtgtgttttaagagtaaattgtagttgtttggtgggttgggttggagttggaatttggattacggtattttttttattttttatttgtgttattttcgtttttttttttgttaatggtttagtttaagtttttgtagtttgaaggttttaggtgagatttttgagaaagtttttttttagtaaggtttaagtttgagtagagatataaaagggtatttagtggagttgtttgtgagggtgtggttggagtttagtttatttttgtttgagattagggaatggttaagttgggagtattaatattttttttcgttttattagtttagattcgtttatggtttatagatattttagtatggtttcggtttaataaataatatatttttattgggtttgttagtttgagtagatattttttttgttttcgagaaatagggtgtgattttagggtagtaggaaggaagtgttagagtggcgatagttgtttatatgttttgaatgtttcggtaaggcgttatagggaagagtgtgtgtttaggataaggaaggataaggagggggtttcgggtgggagttgagtataggtatttttattttgatttagttttttttttttgtatgtgaggaagtttggggttgattaaatatgtttgtttttttttttttttgtgaggatgagatatggggtagtgggggtttggtttaatttagagatgggttgaggttttttattttttttgtttttttatttttttattttgtgtttttatttttttttttttgtttatttttttttattttttttgatttgagttttttttttttttttttttttttcgttttttttatttgttttttagttttattgtaatggattttttattattgtttaagtttttagatttttgttttttttttgtgtatatttattttttttgtttttattagtaattttaggttttttttaattttatagtattatgggtttagggttatttttttattgttgttataagataggagattaaatttttttgtaggttatattatagaataatgtttttttttttttttagttttttatttttttttatatatagtttggtggttgttggaggttagttggatggtgaagtcgaatttttagtttcgttttttttgttaaggttgtcgaggaattttttaggtgttagatggttagcgagatagtaggttatattttttagtagatgttattaaaattatttgggtttgtgggtaggtgggttgtggggttttttagagagatagattaaggatatttttattttttatatttttaggaacgagggtttatttttaatttaattcgtgttttttttttatttttagttttttttaggatttaagtttttgttttttagttgttttttatttaagacgggttaaatggatgtttttatagatttggatttcgggtttgaattgaggaatcgaggtatttggggagaaggag

SEQ ID NO: 108 - DNA, 5477 bp, Artificial Sequence
  chemically treated genomic DNA (Homo sapiens)
ttttttttttttagatgtttcgattttttagtttaaattcgaaatttaggtttatgagaatatttatttggttcgttttgggtgaggaatagttagggaatagaggtttaaattttggaggggattggggatggagaggaaatacgggttgggttggggatgggttttcgtttttgaggatgtgaaaagtagaggtatttttaatttgtttttttggaaaattttatagtttatttgtttataagtttaggtgattttggtgatatttgttgggaagtgtgatttgttgtttcgttggttatttggtatttggaagatttttcgataattttagtaaggggggcgggattgagagttcgattttattatttagttggtttttagtagttattaagttgtgtatggggaggggtgggggattgaaggaaaggaggagtattattttgtgatgtaatttataaaaaggtttggttttttgttttgtagtagtagtggagggatggttttgagtttatagtattgtggggttgaggggagtttgaggttgttggtgggggtaaggaggatgggtgtgtatagggaggagataggaatttggagatttgagtaatggtggggaatttattgtagtggagttgaaggataaatggggaaaacgggggaagagagagaagggaagagatttaagttagagaaagtggaaagagatggatagagggagaaaaatagaagtataaagtgggaggatggagggatagagaaaatggaaagttttaatttatttttaaattaagttagatttttattattttatgttttatttttataaagaagagagggaataggtatatttaattaattttagatttttttatatgtaaggggagggaattgagttaggatagagatgtttgtgtttagtttttattcggggttttttttttatttttttttattttaggtatatatttttttttgtggcgttttatcggggtatttagagtatgtgagtagttatcgttattttggtattttttttttgttgttttgaggttatattttatttttcgggggtagagggagtgtttatttaggttggtaggtttagtgggggtatgttatttattgggtcggggttatgttgggatgtttgtgaattatgggcgagtttgggttggtgaagcgagggagggtattgatgtttttaatttggttattttttagttttaggtagaaatgagttgagttttagttatatttttataagtagttttattgggtgtttttttgtgtttttgtttaagtttgggttttattggaaaaaagtttttttagaagttttatttaaagtttttaggttgtaggggtttaaattaagttattggtaagaaaaaggacgaaaatgatatagatggagaatgaggggagtgtcgtggtttaggttttagttttagtttaatttattaagtagttatagtttgtttttagagtatatatatatagatatatatatatatatatatatatatatatatatatatattgtagtatttgtagtattattggatttttagatagattttttattaaaggtattttttatagttttttaagttttttattttgagttttcgatttattatattagttttttttagtaagatttttttttttattatatttgatgtttttttgatttttttgtttgagatttatagtgttattaaaatgtttgttttgttagtgatttgggttgatacggggtattagtaatgggtatttagaaaagataaaagacgtagaataggtgttttttatgaggttggattttgggtaggtgtttttttaggttttgtgaggggtttgtgaggggtttgttgagagatttggggtttttgtataaaattaggttttcgggtatgttttaaagtgtttgtgtaggtgtttttagggtcgtagtgatggcggggggtattttgggttgggggttgtagatttacggaagttagtggaggaggtgtttttttttagcgaagttggttataaagaggggtagggaggcgaggaggttggtgagttgttgtggggaagcggttatgttgtataggttttgttcgtagtagtggtgttatagagtgtaggagtgtagttagtaggtggtatagtttggtagagggtattgggtttttgagaggtagtttttttatttagtgattttattttggtttgtgggatgaaagaggtatgttgaggcgggggttataggaaaggtcggatggatggaggtagggagttttttggagaagggttattggattagagttttatttgaagtgttaatattgatgttataagttttatcgtttcgatattcggtgggaatagggtggtagggtttggtgaagttatagatgtagtagcggagtttttttcgggtaggggatatggtgagatttgttgaggtagtagagattaggagagtaggagaggtaaattttttttgtggggtaggtagaggttagattcggagagggattatagagagaggtgatatatgaagtagagagaggaaagttgtggaataagggaggaaagttgatagaagtagaaaaaatagttgggcgtagtggtttacgtttgtaattttagtacgttgggaggtcgaggcgggttgattatgaggttagaagattgagattattttggttaatatagtgaaatttcgtttttattaaaaatataaaaaattagtcgggtatggtggtatatgtttttagttttagttatttgggaggttgaggtaggagaattttttgaatttgggtggttgaggttgtagtgagtcgagattatgttattgtattttagtttgggtgatagaacgagattttgttttaaaaaaaaagagggagacgatgtaggaaaagaaatagagatggaggtaagaggggtatagggattgagagatgcgtagatatgaatagaagttataagaattagagattaatataaaaagagtgagataaaaagttagatttagtagtaggaaagttgagggggttagtgaaaaagttaagtaaatggtattagagatagataggaaaatagaaattgatattgattaaagggtttagtatagaagtaatacgtgaaataagggataggggagataggggcggattaaagatgtagtaagggggagatagttatttttaaatgttttgaaaggaaatttttttttttttattttattaggttggtttttttagtggttggtttttttgaagttttttatttttttagttttttttttggttttttttagtatttatattttttttttttttagtttttaggtttttttatatgtttttgtttttatttttagttttttgattattgaaggttttttagtttatttttatttagtgttttatagaggaatagtacgtagaggaagatgttggaggtgtttatggttagatataggtttaggaatttgggagaggtgatttgtatttcgagatttcgggatttgtagagttggagtatttgagtaagatagtgaggaattagtaaataaatatatttagggagtgaatttggggggcggaattatgattagatttattagtttgatttagtaggtagcgggggtttttagtttgtttttgtaaggagtttgtttttgtttggagggttttttttgtttttttagtatgttgtttttgtaatttagtttttttttttgtttttgagttgtgtttgtcgtttttttttttatttttttttttttttttttatgttttaagttgttttttggtttttttagtttttttttgtttttgttttttttgttttttttttttagtgtttttatgttttttaaagttatttttttaaatagtttcggcgtggatttgtttgagtgtagaattaataatatttttatttatatatttatatgtatatataaagtttagttgtgtaagggcggattttatttagttttagatttttttgatttttttaagttttaatatttttattttgtaattatttttgttagttttattattttggaggaaagaaataattacgggtggggttggagggtttgttgatgtgtttgtattggggagaaattattagaaaggaaggtatggatgggatttggggtaggggggtggtgatatagtttggaaggttggggttgaagagattgggaaggaggaaggtttatttggggaattagagttagtatgtattaggaggagtaagattaggaatagggagtgaagataggggagatataggtgtttaggagagtagttttttttaaaaatattgattttaggatttttttatattttttaaagttatttaagattttgaagagtttttttttatgaggttatattaatatttattatattaaaaattaaaatagaaaatttaaagtaggtatttattgatttatttaaataataaaaataataaagtattatatgttaataaaatatagttttgtgaaaaataattattatttttttatagtatagtgagaagttgagtattgttttatatttttgtgaatttagtgttaggtttcgtgggagatgtttgggtttttttatttgtttttgtatttagtttgttgggatatgttgttttcgttgaagtttagtatatgaagaaaatttgattttatatagatagttgtaaaaggaggatttttaaggattttgtgaaagggtattagggatttttaggggtttttgttggtttatagattgttgttgaggataaaggagtttgaggattttagaggatgttgagagtatgttgtggggtttttttttgtttttattggggtttttggtgtttgttgggggagatttttttttttttttttatagttttataaagtttaaggtacgggggatataaggtaggtagagtcgggttggggaggggggtgggtaggaggtagaggcggttttgatacgggtagattgcgatgaaattttagtttgttgggattttgtttagttttttgttaggggttgttttgggtaaggaggcggttagttagttttttatataggttttttgttagtcggttttatcgagggtttaggtttagcgtttttttttttttgttaggaaatcgaatgcggtgttataattgtggtggaagttttagtagtttttgtaaagaggtcgtgattatttgtggcgagggtagattttagttaggtttggaatagattaagttatttggaaatcgtgagtttttagttttttttttttttagtagtttttttttgtttttagttttatgttaatttttttggtttttagaattttttaggtttagtttggttttgggtagatggtgtagttgttagaggagagtagtttgtattttttttggtttttggtacggagtttttgagaggtttatagtttttgtg

SEQ ID NO: 109 - DNA, 3001 bp, Artificial Sequence
  chemically treated genomic DNA (Homo sapiens)
ggatttttgatttggtatttattaggattgaaattatttttttgtttgggttgatcgtaggggatgtcgttgattttattttcgtagcgttaggaggtattatgattatcgttgaggagatagaagatttcgtttcgttttagcgttttatggttatatacgatgaggcggttttttcgtggttttcgttgtttttgtgggaaagggaattgggtgttatagaaggagattttaggggtttagaggtagggatagagaatttattattttttaaatgtaattatatgtatggtttttttgagtttagtttttgtttattgagggttttagttagattttataaatatatattttgtttgaattaagaagtttttttagggtgtatagttggatatgtgtattaggggtttagttatagggtgtatgagagtttaaatttaatttgtgtttattcgttaagttgtgtattttggtataggtttgtgtttgtttaaagaggtagtgtttttttttattttgtatgagggtattgtatggattaacgtagttttgttgataatgttaaatgggaagttaatggtagagttttttttttttttgataatgtgtttttattaggatgttttgttttttaaggaattttatttaagttagaaaatttgattttagagaattttttttttggaaaggagtttatttgggggtattttttagattttttataaggtagttttttttatttattttttaggatagagatttgaatattagagttcggtttaggggtaaatattttagtgttaatatttagggagagatttcggggtgtgttttaggaaatattattatttttgttttatattaatatggtagaggttatttggtagtcggttttgtgagtataaagggagtagaaaagaaatattatttttgttttaatatcgtttattattgttttaaggtttagtttatcggggatatttttattattgataatgaacgttgtaggagattatgtgttgtttgaaaaaaattggaggaagaaatttagagtgagtattttgtaggtattttttttattatttttcgttaattttttattttttgttagggattttaggtttttcgatggttttagggtgtaatttaatatttgtattatttatattttttgttttgttttatttttttttattgtatttattattttgtaatagataaaaaagtttatttgtttattatgtttgtttgtttttttttagtataatttaaattttgagggtagagatttttgatttgttttgttcgtggttatatttatgaaatttaaaatagtgtttggtataggtatatagtatttaataaatgtttgttaagtgaatgtttaattttttggtgattttaatttttagattattgttttagatatttgtttttttcgggttttttttattttttagggatttaggtaattaattttttaagtttttttatttttagggtttttgggtttattgggttgtttatttatttaatttagtatcggtttttttatttagatatttttatattttggtttatggattttcgtagggcgatgaatttggtttttttatcggatgaggatatttttttcgttttagtaaaggcgagaagagtgtttcgcggagtggttgtgatgagcgggatgcggaaggtgtttattgagtcgatttgtttttcgtttatttatagtagttgttttatggttattagcggttgtatttgttatgggaggaggaagggttaataaagataaatttgttttgggggttttaggaatttacgtttcgatgggagagggaggatttaatggggatttcgagtaggggatggggttttagaataagaaagaggaatacgaaggggagtttggagcgaagttggaggttcggagtaggggagggtttacgaaaggagaaggcgtttttagggagggaaggggattttaaaagaggaaggggttcgaatgaggagaaggacggggattcggagagggagaggggttgggagcggtaggaggaaacggggtttgggagaaagaaaagggttttgtcgcggaaagtcggtttagtcgttcgcgtttcgggggatattaggtgtcgattatttgcgcgggtcggggatggggttatgtaaagggtgatttattagatcgaagtcgtttttagttttggattaggaggttgttagagatagtagtaggaagatcgcggtaaatatttaaattttatagtttttttagaagtttagaattcgcggtttttagcgtttgttcgggagcgtcgtgttgggtcgttttttagttattttttttcgtagttgtcgcgattttggtagttagattttatagagtcgggagttagttgattcggattttttaaagcgtagatgttatttttaagttcgtttcggtttggaggtttcgtcgcgtttttcggattttaattggtttttaagtagtttatttttttttacgtgattacgtagtatttcgaagtttgttttttcgattggtttttttggaggtttttttggaggttcggagcgcgtgattcgaacgggaagcggattggttggggtgaagaagggattggtattatttttattgggttttttgattggtcgcggtattaggatacgttataggggcggggtcgattttaaagagtcgggcgcggaaaaaaaaaggtcgtttgtcgtcgtggagagaatgagttatagatttattgagttaataaaatatttttaataaaatttttttgtttgtttgttttgttttggagatagagtttgttatttaggttggagtgtagtggcgcgatttcggtttattgtaatttttgtttttcgggtttaagcgatttttttgttttagtttttcgagtagttgggatgataggtgtatgttattattttcggttaatttttgtatttttaatagagacggaggttttattat

SEQ ID NO: 110 - DNA, 3001 bp, Artificial Sequence
  chemically treated genomic DNA (Homo sapiens)
atggtgaaattttcgtttttattaaaaatataaaaattagtcgagagtggtggtatgtatttgttattttagttattcgggaggttgaggtaggagaatcgtttgaattcgggaggtagaggttgtagtgagtcgagatcgcgttattgtattttaatttgggtgatagattttgtttttaaaataaaataaataaataaaaagattttattaaagatattttgttaatttagtaaatttgtgatttattttttttacgacgataggcggttttttttttttcgcgttcggttttttaaaatcggtttcgtttttgtgacgtgttttggtgtcgcggttaattaaaaagtttaataaggatggtgttagttttttttttattttagttagttcgtttttcgttcgggttacgcgtttcgggtttttaagagggtttttaagagggttaatcggaagggtaagtttcgagatgttgcgtgattacgtgggaggagatgagttatttgaagattaattagagttcgggaagcgcggcggggtttttagatcggggcgggtttaagggtgatatttgcgttttaaagggttcgggttagttgattttcgattttgtggagtttagttgttagggtcgcggtagttgcggggagagatgattggggagcgatttagtacggcgttttcggatagacgttgggggtcgcggattttgggtttttggggaggttgtagggtttgggtgtttgtcgcgatttttttgttgttgtttttggtagttttttggtttaaggttgagaacgatttcggtttggtgagttattttttgtatagttttattttcgattcgcgtaggtgatcgatatttagtgtttttcggaacgcgggcggttgagtcgatttttcgcgataggattttttttttttttttagatttcgtttttttttatcgtttttagttttttttttttttcgggttttcgtttttttttttattcgagttttttttttttttggggtttttttttttttttgaaggcgtttttttttttcgtagatttttttttgtttcgagtttttagtttcgttttaaattttttttcgtgttttttttttttgttttgggattttattttttattcgggatttttattagatttttttttttttatcggaacgtgggtttttaaaatttttaagataagtttgtttttgttgattttttttttttttatgataggtgtagtcgttggtgattatggagtaattgttgtgggtgagcgggagatagatcggtttagtggatatttttcgtatttcgtttattatagttatttcgcggggtatttttttcgtttttgttgaggcgaggaaaatgtttttattcgatgagggggttaagtttatcgttttgcggaggtttatggattagggtataaagatgtttgggtgaaagagtcggtgttaggttggatgggtgggtagtttaatgagtttaagggttttgaggataggggaatttagagggttggttgtttgagtttttgaggggtagagggaattcgagaagggtaagtgtttaggatagtgatttggaaattgggattattaaggagttggatatttatttagtaaatatttattgggtattatatatttatattaggtattattttaggttttatgaatatagttacgaataaaatagattaaaaatttttgtttttaggatttaaattgtattggaaggagatagataagtataataaataagtaaatttttttgtttgttgtaaggtgataaatgtaatggagaaaaataaaataggataagaggtatagatagtgtaagtgttggattgtattttgggattatcggaaggtttgaggtttttagtagaaggtgggaaattaacgggaagtggtagaaagggtatttgtagagtgtttattttgggtttttttttttaattttttttaggtagtatatggttttttatagcgtttattgttaatgatggggatgttttcgatgggttgaattttggggtagtagtgagcgatgttgagataggagtagtattttttttttattttttttgtgtttataaggtcggttgttaggtggtttttattatgttggtatggagtaaggatgatggtgttttttggagtatatttcggaatttttttttggatattggtattgaagtgtttgtttttggatcgggttttggtatttaggtttttgttttaggagataggtggagggggttgttttgtggagagtttgagggatatttttaaatggatttttttttaaggggaagattttttgaagttagattttttggtttgggtgggattttttgaaagatagggtattttggtaggaatatattattaggagaagagggaattttgttattggttttttatttggtattgttaataggattgcgttagtttatgtaatatttttatgtaaagtagaaaaaggtattgtttttttggatagatataagtttgtgttagggtgtatagtttggcgagtgagtataggttgggtttaagtttttatgtattttgtggttgggtttttggtgtatatgtttagttgtatattttgggagagttttttaatttaaatagggtgtgtatttatgggatttgattggaatttttagtgagtaagggttgaatttaaggggattatatatgtgattgtatttgggaagtggtgggttttttgtttttgtttttgagtttttagagtttttttttgtgatatttagtttttttttttatagaaatagcgggagttacggaagggtcgttttatcgtgtgtggttatgggacgttggagcgggacggagttttttgtttttttagcgatgattatggtgttttttggcgttacggaagtggggttagcggtattttttacggttagtttaagtaggaaaatgattttaattttgatgaatgttaggttaggagttt

SEQ ID NO: 111 - DNA, 3001 bp, Artificial Sequence
  chemically treated genomic DNA (Homo sapiens)
ttttcgtttgattgggtgggtagagggagggtcggtatcgttgatggttttgttgcggttggagcgttttattaggatgtttagatgggttttgattgcggcgatgtcggttagtttattttgcgggttaaagcgggtaaagttattaaatttaggtagacgttatacggtttcgtttttttttaggtttatagagaatagttgttttttattaaatttatgggtgaattggttcgaggcgtcgtaagattggtagaaggcgggttcgtaggagtttatgtggttagttgtgtttggcgagtttagggttaaggagagagaaaaaaatgtgtttgttttatttataatatgtgattgttgagtttttgagtttgggtttcgttttgggttttgtgtggggatagagttttgttttgatattgggttggttttgggagagagaaagggagagagaataggaagaaagaggtttattttagtatattgtagtcggtatagagatagtgtagtttggtatattaggatgggaagaggagggattgtttaaaattatgtttggggttttagaatttaaattttggttgtggttatttgttttggttgtgttgttaggttttgtgttgtgagttggtgggattgtgggggtgggatgaggaggaatgattaaggataggagagtatggagttttgtatagagatgtagtgtaggtgggtgtgaggggaaataggttacggttggtaggggtaagaattaaggttagtgatttagagattaaggggatagggagaggtaatttaaggtattataaagagtattggacgaggagttagaagttaaggtttatgttttaatttttttattttagagtattatgattgagtgtggtttttttataattgttgtttagttttttggaagttagggattaagttttaatttttgtagaattttatgaagttgtttgagtaatagttattgaggaattagtatgtatttagtataatggggggttagggaaataaaagaaaaaaaagatgaattatttgtagattcgtattttagtttatgtttttcgaagaataaagataggtaaatagttaattatcggtatgggtataaatattgtaatagaattggatttgatcgggtatattttaggttaggggtggtagagaaattagggtgtttgttggtatttgttgggtggaggtttgggttttaggaaggaggaaggaatgaggagaaatttgaacgttagtaaaggttgattggggtatttgcgtagttgatcgagttgtatttttatttaggtttagagtggatgtgatagagatgagggggattgggtgttttttggtgaaggaagttgtttataaattagagagcgagaggaataagtattttttatgttatttttttatgtaatttaatttcgtaaatttttgtttttcgtcgtatttttttcgttttcgtatttatttttggtggtttttgttttttgcgggtttaggagggttattagggtgtggaattttaggattagttttgttttgagggttattatattttggtgttttaattaaattagttttagttcgtgtggtgaggataggaataaggcggaggtaaagaagaagaaaatagattcgaggatgggggcgattttttttgtttttagttaattatagaaattttttgagtgaatgtatttgttgttgggtaaagagggaaagagtcggggtgagaaggtggaaggatttattgggtttttaggagaggttaaaggaagttttggaggatgggaggggtttggattaattattattacgttttttaagaagggattttttgaagagagagaaaaggtcgttagagtatcgcgtagttgagttttaataaattttttttttatgtttatttgcgatgtagggaattttatttttttaagaagttttcgtggataaattttgagttagaaagtaaaataaattttattaataatttttaaaaggaaaatattggttatataatggaataaaaattttttaaaattttaaattatttttaaaaatgttattttattttttttttattattatttaattttattgtgtaagaaaaaatgtgtaattgttggagttgtttggtttaaagtaaagtgtaaagagttttcgtggatttttcgaggagggtagaggtgttggttttttttgttggtttttttaggattcgggtattttttttaggttgatataggttggaggacggtattatttttgtttttggtttttggttgggttcggttaataagaggtattgggagaatttagtttagtatatatatttaaaaaataaaataaaataaaataataataacgtaaagttaacgtttgtgtaaagagaaatttaattaaattaggttatgtgttaaagattatgaaatcgatgatttttaatttggagggagttaggaaattatgcgggtttttggttttaaatgagaattatttggggggttcgttataatacgtgtttttgagttttttttttatttaatgggttagattagtttttttaaggtagggttagggaatttgtgtttttagtatgttttttaggtggttttcgggtagtttgtggattggtaaaatttgttttaatgttttttttttaatgaataagggatgtttattttaagtggggtagatatagtttttgattttaaattaattaaatgatagttagtaattgatttgtatggttcggtttatggggagttttaattttagttttttcgtttttagtttatagtgtttacgtaatgtttagtatattataggcgtttaggagatatttgcgtatgaatgaatagtgtttttattgttttggttttgttttggttaggatttttgttatttttatttttttttaagtgaggtgggagttggagttatgagatgaaagacgggaaagttatgaaaaatttatgataaagaatgt

SEQ ID NO: 112 - DNA, 3001 bp, Artificial Sequence
  chemically treated genomic DNA (Homo sapiens)
atattttttattatgagttttttatggttttttcgttttttattttatggttttagtttttattttatttggggggaggtgaaggtggtaagggttttaattagggtaggattaaagtagtgaagatattgtttatttatgcgtaggtgttttttaggcgtttatgatgtgttaggtattacgtagatattgtggattagaaacgaaaaaattaagattagggttttttataaatcgggttatgtaaattaattattagttgttatttgattaatttgaagttagaagttgtgtttgttttatttaaaataggtattttttatttattgaggaaagagtattggagtaggttttattagtttatagattattcgagaattatttggggagtatgttgaaaatataggttttttggttttgttttggaaaggttaatttaatttattaagtaaagaggaaatttaggaatacgtattataacgaattttttaggtgatttttatttggaattagagattcgtatgattttttagttttttttaagttgaaaattatcgattttatggtttttgatatatggtttaatttggttagatttttttttatatagacgttagttttacgttgttgttgttttgttttgttttgttttttaaatatatatattggattaaatttttttagtgttttttattagtcgagtttaattagaagttaaaggtaagggtgatgtcgttttttagtttgtgttagtttggaggaggtgttcgggttttggagggattaatagagaggattagtatttttgtttttttcggggagtttacgggagttttttatattttgttttagattaaataattttaataattatatatttttttttatataatgaaattaaataataataaaagaaaaataaaataatatttttgaaagtgatttaaagttttaagaggtttttattttattgtgtagttaatgttttttttttaaagattattggtaaagtttattttattttttaatttaaaatttgtttacggaaattttttgggaaagtaggattttttgtatcgtagatggatatagagagaggatttgttggagtttagttgcgcggtgttttgacggttttttttttttttttagggggtttttttttggaggacgtggtaatagttggtttaagttttttttattttttaaaattttttttggttttttttgggggtttagtgaatttttttatttttttatttcggttttttttttttttatttagtaatagatatatttatttagagaatttttgtgattggttgaagatagaaggggtcgtttttattttcgaatttgttttttttttttttattttcgttttgtttttgtttttattatacggattgagattgatttgattaaagtattagagtgtaatggtttttagagtagggttggttttggggttttatattttgatgatttttttgagttcgtaggaggtaggggttattaagggtgagtgcgagggcgaggagggtgcggcggggagtagagatttacggagttgggttatatgaggaggtggtatggaggatgtttgtttttttcgttttttggtttatgggtaattttttttattaagagatatttaattttttttatttttgttatatttattttggatttaaatgaagatgtagttcggttagttgcgtaggtgttttagttagtttttgttgacgtttagatttttttttattttttttttttttttgagatttaaatttttatttaatagatgttagtaagtattttgatttttttattatttttggtttggaatgtgttcgattaagtttagttttgttgtagtatttatgtttatgtcggtagttaattatttatttgtttttgtttttcgggagatatgagttggggtgcgggtttatagatggtttatttttttttttttttatttttttggttttttattgtgttgggtgtatgttagttttttaataattgttgtttaaataattttatagagttttataagaattaaaatttaatttttaatttttagaaaattagataatagttatggaagagttatatttagttataatgttttgagatggaggaattgggatatgaattttgatttttgatttttcgtttagtgttttttgtaatgttttgagttgtttttttttatttttttggtttttgggttattaattttaatttttatttttgttagtcgtggtttgtttttttttatatttatttgtattgtatttttgtgtaaagttttatatttttttgtttttaattatttttttttattttatttttatagttttattagtttataatatagggtttgataatatagttagggtagatgattatagttaagatttaaattttggaattttaagtatgattttaggtagttttttttttttttattttgatatgttagattgtattgtttttgtgtcgattgtagtgtgttgggatgagtttttttttttttgtttttttttttttttttttttttagggttagtttagtgttagaataggattttgtttttatatagaatttaggacggggtttaggtttagggatttaataattatatattgtggatgagatagatatatttttttttttttttttgattttgaattcgttaaatatagttgattatatgggtttttacggattcgttttttattagttttacggcgtttcgggttagtttatttatgaatttgatgaggaatagttgttttttgtggatttgaagaaaagcgaggtcgtgtggcgtttgtttgagtttggtgattttgttcgttttgattcgtagggtgggttggtcggtatcgtcgtaattaaagtttatttggatattttggtggagcgttttaatcgtagtagagttattaacggtatcggttttttttttgtttatttagttaggcgggaa

SEQ ID NO: 113 - DNA, 6944 bp, Artificial Sequence
  chemically treated genomic DNA (Homo sapiens)
gaagttttataagatcgaagtggagttattggagtgttttaggtgaagaaacgatatattttgatttatagtagtaggattattgtggagagaatatttaggtggtaggtaatggaatagtgttagagttattatttaggagtgatagagtggtggggattaagggaagaggagggtttgagggatgagagggacggagggaagggttggagaagtaggaggtgaggagaaggagtagagggatagaatttgaaagtagtagaatttttagttttaaatatattgttttataaatttttaatatatttatttatagagtttagtagggtgttttttgtatttggtttttaatattttatgtgggattgtttaaaaattaattgttttttttgtttttttttaggtttaaaaaaatattaagtgttttaataaaatatgtatattatttagatgcggatattttttaaaaataggaagtgtatgagtattggtgaggggtattgtgattgcgttgaatatttgtaattttgaggtgaatgaatgtattggtttttggttgtaatatataattatacgttgtgttattttgtattgttaggagatgttttggatttttatagaaatttagggttatggaatgaaggtaattttagaatataataagagttatagatatatagtttgggaaagtaaaatttaggagttttgagagttgtataattgtaatgtatttagatatatttatatattaaggggttaaagtaatagtttttatatataagatttttgattggtcgggcgcggtggtttatgtttgtaatcgtagtattttgggaggtcgaggcgggaggattacgaggttaggagatcgagattattttggttaatacggtgaaattcgtttttataaaaaaattagtcgggcgtggtggcgggtatttgtagttttagttattcgggaggttgaagtagaagaatggcgtgaattcgggacgtagagtttgtagtgagtcgagatcgcgttattgtattttagtttgggcggtagagagagatttcgttttaaaaaaaaaaaaaaaaaaaaaaaaaaaaaaaaaaaaaaaaaaaaggtttttgataatttaggggttattaagattttattatttattgtagttaataaaaaaaaaaaagaaagaaagaaattggtttttgttttattttatatgtttaggtataatttttttagagaagaagaggaggggggcggggaggagtaggaggaggaggaaagaaggaggagaaggagaaggagaaggagaaggagaggaagaggaagaggaagaggaagaggaagaagaagaagaagaagaagaagaagaagaagaagaagaagaagaagaagaagaagaagaagaagaagaagaagaagaagaagaagaagaagaaaaggaagaagaagaaattgtttttatatttttatttttaggataagtttattgtttggtattaagttttttggggtgaatttttttttaaaagagttcggggagtttaggtatggaatgggaggtagaaagtttaattaagggattgggatttcggaatgaataatgaagggagatggattgggtttatgtcgaaggtttttttttggttttttagttttcgggcgaagatttagggagatattgagatatattttgtataggagggggagggggagggggagggtaaagttttagggttttaggagtggtttttaagggtttaggtttcgaggcggtgtttggggttgggaggtttagtattgagaattttttatttttttagagttttttttttttttttaattcgtgttaggtttttttttttggatatttataacgcggttttattttttatttttattgggcgtcgcgtttttagagaagttaattagtgtcgtcgtagtttttaggttttaaagttttacgtatttcgcgggatttatattttttttagacgcggaggttggggttatggcgtttcgaagtttttttttgttgtttttaggggttttggttttgatcgatatttgggcgggtgagtgcggggtttagagagaaacggtttttgtggggaggagtgaggggttcgttcggtgggggcgtaggatttagggagtcgttttcggaggagggtttggcgggttttagttttttttcgtttttaggtttttattttttgaggtattttagtatcgttgtgtcgcggttcggtcgcggggagtttcgttatatcgtcgtggagtacgtagacgatacgtaatttttgcggttcgatagcgacgtcgcgatttcgaggatggagtcgcgggagtcgtgggtggagtaagaggggtcgtagtattgggagtggattatagggtacgttaaggttaacgtatagattgatcgagtggttttgaggaatttgtttcgtcgttataattagagcgaggttggtgagtgaattcggtcgggggcgtaggttacgattattttttattcgttacggatcgttcgggttttttagagttttcggattcgaaatttatttcgaggtagcgggattcgtttagattttttattcgggagagttttaggcgtttttatttaggtttatttttagtttaggttaaaattttcgcgggttgggcggggagggggcggggttagttgggcggggttgattgcggggatcggttagggttttatattttttagggaatgaatggttgcgatatggggttcgacggacgtttttttcgcgggtattattagtacgcgtacgacggtaaggattatatttttttgaacgaggatttgcgtttttggatcgcggcggatatcgtggtttagattatttagcgtttttatgaggtagaggaatatgtagaggagtttaggatttatttggagggcgagtgtttggagttgtttcgtagatatttggagaatgggaaggagacgttatagcgcgtaggtattaggggttatgggcgttttttttattttttgtagattttttgggatggtttcgtataaggttgggaggaaagtggatttaatgttaggatatcgttttttttttagttttgagtaggaagaatttttttggttttcgagattcggtattagagagtgattgtgagagttcgttttgttttttgggataattaagggatgaaatttttgagggaatggagggaagatagtttttggaatatcgattcgcggttttttttgagttttttaatagttttgggtttcgtgattttttttttaagttttgttttttgttttatatttaatgtgtttgaggttttgattttagtttttcggtttttatttaggttagggttagaagtttttgttttttttttagagattttaattttttaaggaataggagatttttttaggtgtttgtgtttaggttggtgtttgggttttgtgtttttttttttattttaggtgttttgtttatttttaggttggttatatgggtgttgttggggttttttatgaggagtgtaaagtgtttgaattttttgattttttttagattttttaaaggtatacgttgtttattattttatttttgattatgaggttattttgaggtgttgggttttgggtttttattttgcggagattacgttgatttggtagcgggatggggaggaatagatttaggatatagagtttgtggagattaggtttgtaggggatggaattttttagaagtgggtcgttgtggtggtgttttttggagaggaatagagatatatatgttatgtgtagtacgaggggttgttttagttttttattttgagatggggtaaggagggagatgggtaaagaggggaacgaggggttatgtttttttttagggaaagtaggagtttttttggagttttttagtagggttagggttgaggtttggagattagggttttttatttttttttttttttttagagtagtttttttagtttattatttttatcgtgggtatcgttgttggttttgttgtttttggagttgtggttattggagttgtggtcgttgttgtgatgtggaggaagaagagtttaggtaggaaggggtgaggagtggagtttgagtttttttgttttattgggggttgtaagttttaagtagaagtgtgttttgttttattattgggaagtattatttatatttatgggtttatttagtttgggttttgtgtgttagtatttatttatttgtaaagtttttgtgaaaatgaaggatagattttttatttcgatgattatggtggtgatgggatttgattttagtagttataaattataggggaaggtttttgttgatgatagattttaggagggtagttggtttaggatttatatttgttttttttatattttttgattttgttttggatttatagttatatttttttggaaatttttttgggattaaagattaggggtttgttttaggattttatggttttgttttttttttggttttttataggatattttttttttatagatagaaatagagggagttatttttaggttgtaggtaagatgaaggaggttgatttttgagattgttgggatattgtggttaggagtttatgagggagtttatttattttatagtttttttagttatatttgtgggttttgattaggttttgtttttgttttattttaattattgatagtgtttagggttttggggtgttttttatagttaataaaggtgatattttagggtaggggttttgatgtgagtggggtgttgggggggaatagaggggatttagttgtgttattgggtttttttgatttggatgttttgagtatgaaatgggttatttagagtgttattttttattgtgattgatacgaatttgtttatgaatattttttttatagtgtgagatagtttttttgtgtgggattgagaagtaagatattaatgtagtagaattgtatttgtgttttacgaatatatataaattttaaaaataaagaataaaaatatatttttttatagatataggtagatatgtttttatagtatgtacgtaaatgtgtgtgtgtgtgtgtgtgtgtgaagagaaagagtgaatagagagattaagatttttttaatggtgaaaagatatatatatatttggaattagttagtttgatttagtttaggtgattttaattttggtggtaataattaaagtatcgtagttaggagttagtcgaatatatgtttttttttttttattagattgaattagagtgttgattttggttatattaatgttataaatttttttatagtttgtttgatttggtgtttgttggttttaatatttatagtgaatataagtaggttgttgttttttattttttttatagtttatttagtggttagcggaaatttgatgataatatggtggttaagtttattttttttgggggtgtttttttaaggatatttgggttgttttcggagttatagtgttttgggtcgtcggaaggtgggtgatatgtggattttgttttttttgtggttgtggatattttttaatattgtttttttggttttgtaaagttttcgttttggtttcggttttaggaggggtaggagttttttttttcgtttttggtattattttatgaaaagggtttagattaagatttttgattgagttattttaaagtaagttgtaagatttatgatattagattattaaatattttattatatattttttaagaataagaattaatattattatattaaagaaaataaataattttataatattatttaaagtttttttatgtttaaatatttttattttttttagtatatttttgtatttattttttatagtttgtttttttaaaatgtttattcgttgtttttggttatgtttttttaattatttataatttataataattaatttatttttttttttttagaatggtattatttgttttagagatgaggttaaatatttgtggaattttttttatattgaatttattatattattttttttgatgtttttaattttttttttttaattgttatgttttttaaggatttatgtagttttgggttaaatatttggtagtaatgtttataggaggagttgtgatcgtatatttattatattaggaggtatataaagtttagggttattaggattttttttgattttatatagttaaatttattttgattttttagagatgtagaattatgggttgggtgtttagtgggtatgagtgtgatattttggtaataggaggttttgttattttttttattttttacgagttttagttttttatattttgaggttttgagttttagatttttaattattaggttaggtttttttagatttagattttttttttgttttttttagttttattttgttttgtatttattttcggattattttttttttataggtttagtttttgagtgtttttattttttaaataagtatttttatttaggagtaatttttttattagaggatattagttatgtttggaaaaatgttttgttgttatgattggagtgaggaggaggtgttattagtattttgtggggaatgattagggatgttgaatattttgtagtgtataagttagtttaattatttatataatagataattatttagttttaatattaagattgttaagggtaaggaggtttgttaggatttttttttttttgagtataagtttttttgaattgagggatattttgaaggaaaagtgtggttttattttagttattttttttttttttggagttttatttgtatgtttgtagtgtttaggtttgtaatttggggtttaggaatttatttttttatgagattgtatgtagaagtgatgatatgtgtatata

SEQ ID NO: 114 - DNA, 6944 bp, Artificial Sequence
  chemically treated genomic DNA (Homo sapiens)
tgtgtgtatatattattatttttgtatgtagttttatgggaaggtgggtttttggattttaggttataggtttaagtattataggtatatagatggagttttagggaagggagagatgattggggtgggattatattttttttttagggtgttttttagtttaaggaagtttgtatttaagggagagaaagttttggtaggtttttttatttttggtaattttggtattggggttggataattatttgttatgtgggtgattgggttgatttgtgtattgtaggatgtttagtatttttggttattttttataagatgttggtagtattttttttttattttagttatggtaataaaatatttttttagatatagttaatgttttttggtgggaaaattgtttttggatgagaatatttgtttgagaggtagagatatttaggagttgggtttgtagagggaaagtgattcggaagtagatataaagtagagtggggttggagaagataggaagggagtttaggtttggaggggtttggtttgatggttgaaggtttggagtttagaattttagggtatggggaattaaagttcgtgaggaatggggagagtggtagaattttttattgttagaatattatatttatatttattaaatatttagtttatggttttgtatttttgggaagttaggataaatttggttgtatggggttagaaagagttttggtaattttaggttttgtgtgttttttgatgtgatgaatgtgcggttatagttttttttgtaaatattgttgttaaatgtttaatttagagttatataggtttttaggaggtatagtagttagaggaaaaaagttaaaggtattaggggaaataatatgataaatttagtgtggagaagattttataggtatttggttttatttttgaaataggtaatgttattttaaaagaaaaaagatgggttgattgttatagattgtaggtaattaaagaaatataattaaaggtaacgagtggatattttaagaaaataagttataaaaaataggtataaaaatgtattgaaagaagtggagatatttgaatataaaaggattttaaataatattatggaattatttattttttttggtgtgataatgttggtttttatttttaggaggtgtgtgatgaagtatttagtggtttagtattatgggttttgtaatttattttagaatgatttagttaaaaattttaatttggattttttttataagatggtgttaagaacgaagaaggaagtttttgttttttttaaagtcgaagttaaagcgaaggttttgtaaggttaagaaggtagtgttgaaagatgtttatagttataaaaaaaataagatttatatgttatttatttttcggcggtttaagatattgtgatttcggaggtagtttaaatatttttggaagagtatttttaggagaaataagtttgattattatgttattattaagttttcgttgattattgagtaggttgtgaagaagatagaaaataatagtttatttgtgtttattgtggatgttaaagttaataagtattagattaaataggttgtgaagaagtttgtgatattgatgtggttaaagttaatattttgatttagtttgatggagagaggaaggtatatgttcgattggtttttgattacgatgttttggttgttgttattaaaattgggattatttaaattgagttaagttggttagttttaaatatatgtatatttttttattattaaaagaattttaatttttttatttattttttttttttatatatatatatatatatatatatttacgtgtatgttataaaaatatatttatttgtatttataaaaagatatatttttattttttatttttaaaatttatgtatgttcgtgaggtataagtgtaattttgttatattgatattttgttttttagttttatataaggaagttgttttatattatagagaaaatatttatgaataaattcgtattagttatagtgagaggtaatattttaaatagtttattttatgtttaagatatttaagttaaagaaatttaatagtatagttgagttttttttgtttttttttaatattttatttatattagggtttttgttttggagtgttatttttattagttgtgagagatattttagagttttgggtattgttagtgattggggtagaataaaaataggatttggttagagtttatagatgtggttagaggaattgtggggtgggtgagtttttttataggtttttgattataatattttaataattttagggattagttttttttattttatttgtagtttgagagtagttttttttgtttttatttatgggaagaaaatgttttgtgagaggttagaaaggaggtagggttataaggttttagagtaaatttttagtttttgattttagagaagtttttagaaaagtgtaattgtagatttagggtaggattaagaaatatgaagaaagtagatgtgggttttggattaattgtttttttgaggtttgttattagtagggatttttttttgtgatttgtgattgttgggattaggttttattattattataattatcgaagtgaagaatttgttttttatttttataggagttttataaatgagtaggtgttggtatatagggtttaggttgggtagatttatgagtgtggatggtgttttttagtaatgaggtagggtatatttttatttggggtttgtaatttttagtgggataagaaaatttagattttattttttatttttttttatttgagtttttttttttttatattatagtagcgattatagttttagtgattatagttttaaggataataaggttagtaacgatgtttacgatggggatggtgggttggggagattgttttgggaaaggaagggaaggtgaggggttttgatttttaggttttagttttgattttgttgaagagttttagaagggtttttgttttttttgagaaaagatatgatttttcgtttttttttttatttatttttttttttattttattttaggatgaggggttggggtagtttttcgtgttgtatatggtatgtgtatttttgtttttttttaggaggtattattatagcggtttatttttggaaggttttattttttgtaggtttggtttttataagttttgtgttttgggtttgtttttttttatttcgttgttaggttagcgtgattttcgtagggtagaagtttagggtttagtattttagggtggttttatggttagagatggggtggtgggtaacgtgtgtttttggaggatttgagaagagttagaaaatttaggtattttgtattttttatgggaaattttagtagtatttatgtgattaatttgagaatggataggatatttggggtggggaagggagtatagaatttagatattagtttggatatagatatttgggaaaattttttattttttggaaagttagagtttttgaggggggagtagggatttttggttttgatttaagtggaggtcgagggattggaattagagttttaaatatattgagtgtgaggtagagaataaaatttgagagaaaagttacggggtttaaggttgttggagggtttaaaggggatcgcggatcggtattttagggattgttttttttttatttttttagaaattttattttttaattgttttagagagtagggcggatttttatagttattttttggtatcggatttcgaaagttaggaagattttttttatttaggattagagggagggcgatattttagtattgggtttattttttttttaattttgtgcgaggttattttaagagatttataggagatagggaaggcgtttatggtttttggtatttgcgcgttgtagcgttttttttttattttttaagtatttgcggagtaattttaggtattcgttttttaggtaggttttgaatttttttgtatatttttttgttttatagaagcgttgggtgatttgagttacggtgttcgtcgcggtttaggagcgtaggttttcgtttagggagatgtaatttttgtcgtcgtacgcgtgttggtgatattcgcggaggaggcgttcgtcgggttttatgtcgtagttatttattttttggagggtgtgagattttagtcggttttcgtagttagtttcgtttagttagtttcgtttttttttcgtttaattcgcggggattttggtttaaattgaaaatgaatttgggtaaaggcgtttgggattttttcgggtggagggtttgggcgggtttcgttgtttcggggtagatttcggattcggagattttgagggattcgggcggttcgtggcggatggggggtggtcgtgatttgcgttttcggtcgggtttatttattagtttcgttttggttgtagcggcggagtaggttttttagggttattcggttagtttgtgcgttggttttggcgtattttgtggtttatttttaatattgcggttttttttgttttatttacggttttcgcggttttattttcggaatcgcggcgtcgttgtcgaatcgtaggaattgcgtgtcgtttacgtattttacggcgatgtagcggggtttttcgcggtcgggtcgcgatatagcggtgttgaaatattttaaggagtgggagtttgggggcgaggaggggttgagattcgttagattttttttcggaggcggttttttgagttttgcgtttttatcgggcgggttttttatttttttttatagaggtcgtttttttttggatttcgtatttattcgtttaagtatcggttagggttagggtttttgagagtagtaggaggaggtttcggggcgttatgattttaattttcgcgtttgggaaaaatatgagtttcgcggggtgcgtgggattttagaatttgggaattgcggcgatattgattggtttttttagaaacgcgacgtttaatgggagtgagaaatggggtcgcgttatgagtatttaggaagaaggatttgatacgggttgggagagaaagagaaattttggggagatggggaatttttaatattgagttttttaattttagatatcgtttcggggtttgagtttttgagagttatttttggggttttgggattttgtttttttttttttttttttttttttgtgtagggtgtgttttaatgtttttttgagttttcgttcgggggttgagaaattagggagaaattttcggtatggatttagtttatttttttttattatttatttcgaaattttagttttttgattgaattttttgttttttattttatatttggatttttcggatttttttggaagaaaatttattttaaggagtttggtgttagataatgaatttgttttgagaatgaaggtgtagagatagtttttttttttttttttttttttttttttttttttttttttttttttttttttttttttttttttttttttttttttttttttttttttttttttttttttttttttttttttttttttttttttttttttttttttttttttttttttttttttttttttttttttttttttttttttttttttttgttttttttcgttttttttttttttttttttggaaaagttgtatttgagtatatgaaataggatagagattagttttttttttttttttttttttttattagttgtagtgagtagtagaattttggtaatttttgaattattaggaattttttttttttttttttttttttttttttttttttttttttttttgagacggagtttttttttgtcgtttaggttggagtgtagtggcgcgatttcggtttattgtaagttttgcgtttcgggtttacgttatttttttgttttagtttttcgagtagttgagattatagatgttcgttattacgttcggttaatttttttgtagagacgggttttatcgtgttagttaggatggtttcgattttttgatttcgtgattttttcgtttcggttttttaaagtgttgcgattataggtatgagttatcgcgttcgattaattaggaattttatgtgtaaaaattgttattttggttttttgatatataaatgtgtttaaatgtattatagttgtataatttttagagtttttaagttttgtttttttagattatgtatttgtgatttttgttgtattttaaaattatttttattttatagttttgagtttttgtgggagtttaggatattttttgataatataaagtagtataacgtgtgattgtatattgtaattaggagttaatatatttatttattttaaagttgtaagtgtttaacgtagttataatgttttttattagtgtttatgtattttttgtttttaggaagtattcgtatttaagtggtgtgtatgttttattggaatatttagtatttttttaaatttgaaaaaaagtagaaaaagtaattaatttttaggtagttttatataaggtgttaaaggttaaatgtaaggaatattttgttaggttttgtagatggatgtattaaaaatttataaaataatgtgtttaaagttaagaattttgttgtttttaaattttgtttttttgttttttttttttattttttgtttttttagttttttttttcgttttttttattttttaggtttttttttttttttagtttttattattttgttatttttgaatagtggttttagtattgttttattatttgttatttgagtgttttttttatagtggttttgttattgtgagttaaagtgtgtcgtttttttatttaaaatattttagtggttttatttcggttttgtgaagtttt

SEQ ID NO: 115 - DNA, 3001 bp, Artificial Sequence
  chemically treated genomic DNA (Homo sapiens)
ttattttattagataaggttgttaaattaaggttttgaggtttttttatagataatgtgaagttatttatggtttttgagaaatagagggagtagaattttgtgtttttaatggattatttgaataggagtgaagaagtttgtttaaaaaaaaagattgagaaatttgttgagagattattataatggtttatatgaatgttaataaagttttgttcgggggaatgtatagtgaagaataaataggaaaaattattttaaaagaagaaataataagatttggtaaaggtttgattatgtaaatagtggggaagttagagttttgagtttaaatatgtggtagaattggtgtagttaattttatttggaagattaagaatagaaagatgatagttttaatattgagtatttgaagttttttagtataatattggatagaattggaaaaaataaatttggggattattagtttttaagcggtattaaaagttatgggaaaggaagataatttatggtaaattgtatagaaaagatagaaggtttatattaaggtttgggaaagtttatttttcgaagttatattgtgaggtgatatgtttttaggtatgggttagaaaaatttttttattcgtttatatttattttatatttttttagagtgtagagtttgtgaaaggttaggttatgtttatatatagttttttattttttttttgagtttgttgaattttttttgtagagttttttttttttcgtttagttcggggggtattattaatatggtggtttttagtttaggggtagggtttaagatatttttttttattgttattattcggggtttatacgtcgtttatattgtatttaattttatttttttaggtttgtttatttttgtttttggttttttttattttttgtttaaattaggttgttgtttaagttttcgttggtcgggattatttagtatttttttttgtttttagggattatagatattagtatttttaggtattatgtggtttaaggagggataaatatttatttcgtcggaaagacgatggtattcgatttttttattttcgttagggtaaggataatcgcggggtttgaacggtagagaaggcggtggagttagcgtagcgttcgtagagtaacgtaaagaggaagaatagagaaacggttatgagaaaaagggtcgaagagtgagaagtagagggttttattcgagggggcggtaatcgggggttttacggttttcggtcgcgttcgcgttggtcgttgatagcgggtttataacgatgacgtagcgaggagcggaaaacgcggtaattaaggcggttttaggcgcgtattttcgttcggttttttatcggtttaggtttgttttttcgtagcgatagtttacgttttcggcggggttgtatcggaagttgtttttattttcgttcgtttcggggcggggtttatttcgtagcgattatttgtcgtattttcgggttgttaggtagttgttgtggttttaggatgatggagatagagcgatttggtgagggggaggggagggaaatggaacggagtagtcgatatggaatgaattttgatttttgatttttgattttttttcgtagtgttattttttttagattttttggatttattttttcgggtcgtggagttcggatgtacggggtattgggagttgttgaatttgtttggagttttagagagtagcgtgagtgatttttgattttaatttttgattcgtattgagtttaaattttttttattttttttatagtaggatttagtttaattttgtttatttgtgtttgtatttttgtttattttagtttgaaggggtgttggatagattatagtttagtgtatttgtagtacgtgtgaggatagagtagaaagggttggggatatttttgttttgagagttgtttttttaaatgtggtattttttcgtggagtttttttttgtatttaagtattagggtatttggtgattgagatgataggttttgagtttttaattttttatttttaggtttgggatttttttttttaaaattagtgagtttttaattttagtgtgttttatgattagttagggagttttttaaaaatgtatatttttaggtttagtttttatgtttttgaaatttaaaatttgttttaggtaatttagtagtaggtagtttttggttaagtttgattgttttagtttgtttgatatatttgttatttttgatttgaatataagttttattattttttttgtttgtattttattttttttttttatttaatgttttttattttgtttttgttttagtttttttatggtttttttttttgtgttttagatttgtagtaagaagtagaatagttgtttttgttatttttagtttggttgtttttgtatggtgtggagtatttagttcggtgaggagtttggaggggtttagattagggtgatgggtttttgaaggaagttgggatagaggaagaaagaagatttaaaagttattatttttttttttagaaaatggtagaggaagacggatttttggttttttttggttgttttgggagttttagttttattcgatttataggtttaaagatatttaattataggttagatattgggttataaagaggtaggaggttaggggttatgagaaatagttggggagaaggggaggtggttagagataagtttagttttattggggttttgattttttgttttaggttttgttggagaatataaatttttcggttataatttttttgttttttcgtcggtttttagggttagttttttagtttttatggggaaatttaattcggtattttttttggttaggtgatttttgtggagatgggatggtagaagagggtgtttttaatttttagggaagggttttttatttatttcgtattatttttattttatgaatttttgtttgttttgtttttttttaggg

SEQ ID NO: 116 - DNA, 3001 bp, Artificial Sequence
  chemically treated genomic DNA (Homo sapiens)
ttttgggaagagataggatagatagggatttatgggatgagggtaatacgagataggtggggaatttttttttggagattaaagatatttttttttattattttatttttataagagttatttggttagaagggatatcgagttggatttttttataaggattgggaggttggttttggaggtcggcgaagagataaggaggttgtagtcgagagatttgtgttttttagtaagatttaaggtaagagattagagttttaatgaggttgagtttgtttttgattatttttttttttttttaattgttttttatgatttttgattttttatttttttgtaatttagtatttggtttgtggttgggtgtttttgggtttgtaggtcggatgggattggggtttttaggatagttaaaagagattagggattcgtttttttttgttattttttggagagaaaaatagtaatttttgggttttttttttttttttgttttagttttttttaggaatttattattttagtttaagtttttttagattttttatcgggttgagtgttttatattatgtagaggtagttaggttggggatgatagaaataattgttttgttttttgttgtagatttggggtataaggagggaggttatggggaagttgaaataagggtaagatgagaggtattaggtaaggaaagaggataaaatgtagataaaagagatgatgggatttgtgtttagattagaaatggtagatgtgttaaatagattaggataattaggtttggttaaaaattatttgttattgaattatttggggtagattttggattttagaaatatggaggttggatttaggaatgtgtatttttaaaaagttttttggttaattatgaagtatattgaaattggagatttattgattttagaaaaaggggttttagatttaaggatgaaaggttggaggtttaaagtttattattttagttattaagtgttttggtgtttggatatagaagggagttttacggagaaatgttatatttgaaagagtagtttttaaagtaaaaatatttttagttttttttgttttgtttttatacgtattgtaggtatattgggttgtaatttgtttagtatttttttaggttgggatggataggagtataggtatagatgaataaggttaagttagattttattgtgaggagggtgaaggaggtttggatttaatgcgggttaaaggttagggttaaaagttatttacgttattttttggagttttaggtaagtttagtagtttttagtgtttcgtgtattcgagttttacggttcgaaggggtaggtttaggggatttggagggggtagtattacggggaaaggttaaaagttaggggttaaagtttattttatatcggttatttcgttttatttttttttttttttttttattaagtcgttttgtttttattattttggagttatagtagttgtttggtagttcggaagtgcggtaagtagtcgttgcgaagtaagtttcgtttcggaacgggcggaagtagaggtaattttcggtatagtttcgtcgagagcgtgaattatcgttgcggaggggtagatttggatcggtggaaggtcgggcggaagtgcgcgtttggggtcgttttggttatcgcgtttttcgtttttcgttacgttatcgttgtgagttcgttattagcggttagcgcgggcgcggtcggagatcgtggggttttcggttgtcgttttttcgggtaaggttttttgttttttatttttcggtttttttttttatagtcgtttttttgttttttttttttgcgttgttttgcgggcgttacgttggttttatcgttttttttgtcgtttaaatttcgcggttgtttttattttagcgagggtaggggggtcgggtgttatcgttttttcgacggagtggatatttgtttttttttgaattatatggtatttaaaggtgttggtgtttgtgatttttggagataggagggaatgttggatgatttcgattagcgggagtttggatagtagtttggtttaagtaaggggtagggaaagttaaagataagagtaggtagatttgaaggggtggggttgggtatagtgtggacggcgtgtgaatttcgggtggtaatagtggagaaagatgttttgggttttgtttttgaattaggagttattatgttggtgatatttttcggattgagcgaggaagaggaggttttgtagaagaaatttaataagtttaagaaaaaggtgagggattgtgtgtggatatggtttaattttttatagattttgtattttgagaagatatggggtgagtgtgagcgaatggggaagtttttttggtttatatttagagatatattattttatagtgtagtttcgagaggtgggtttttttaagttttggtgtggattttttgttttttttatgtaatttgttatggattgttttttttttttatggtttttagtatcgtttaagagttgatgatttttaagtttgttttttttagttttatttagtgttatattgaaaaattttagatatttagtgttgaagttattatttttttatttttgattttttaaataagattgattatattaattttgttatatgtttggatttaaaattttgatttttttattatttgtatagttaaatttttgttaagttttattgtttttttttttgaagtaattttttttgtttattttttattgtgtattttttcgagtagggttttattgatatttatgtgggttattgtaatggttttttaataaattttttagtttttttttttgaatagatttttttatttttgtttaaatgatttattgaaaatataaaattttgttttttttgttttttaaaaattataaatggttttatattgtttataaaaaagttttaaaattttagtttggtagttttgtttagtaaagtag

SEQ ID NO: 117 - DNA, 8056 bp, Artificial Sequence
  chemically treated genomic DNA (Homo sapiens)
agtttgtttggtcgttttagggtttgttggaatttttttttcgtttatgtatttgtgaattattttacgtttgttattatcggttttttatagggtgatgtttattagtagtggtgataggttaatttttattattttttatgcggttgaatagttatttttgaattatttttttttttagtaattttttttttttcggattttttgtagttaatttgaaagaataataaggaggtggttggaaatttgttttaaggaatcgtttgtttttttttcgttggaaattttgtatttcggacgtttttgtttttgtttttatttgattttcgttttcgttgatatttaggcgcgatgatttttgttgttagtagagggtatatttattttattttcgtaaatttgaacgcgggtgttgtttagagagggggcggagggaaagacgttttgtagtaaaatttagtatagcgattggttgtttttcgcgtttgcggtaaaggtttggaggtaggagtaatttgtaatttttaaagttgaattgtgtagtgtatcggatttggaagttattatatttatttaatatttgaacgttgagttgtaaatttaacgggtaataatttattttgaatagcgtatatgttatatacgtatttttttttttcgaattgtttttttttttggaggtggtggagggagagaaaagtttatttaaaatgtttttgggtgagggattaaggatgagaagaatgttttttgttttttatgtcgtggaataatataaaataaaaaatttcgagggaatatatattatatattaaatatagattattttagggagtaaataaattatgtgtggggttgggtaattagttaagtcgaagcgtaaataaaatgtgaatatacgtttgcgggttatatatagtgtatttttattagtatttagaaaaaattgtgagttagtgaattaggaaattaatgtttggaaggtagttaaattttaattaatttaagatttttttttttttaaaaaaaggtacggaagtaatatttttttttttttttttgattagaatcgatgtattttttgtgtatgatcgtatttttaataataaaaggggaaagaggatttggaaaggaattaaacgttcggtttgttcggggaggaaagagttaacggttttttttataagggtttttgttgattttttcggttcggtttataagttttttatttgttttttttaggaagttcggtttcgcggttcgggtattttttgttttttttatattttttcgtttagtatttttgattttttttaaattcggtagttcgagattgttgtaaatcggcgttatagggcgtaaaggggatttgttttttttgaaatttggttgagaaattgggaatttcgtgtgggaggcgtgggggtgggacggtggggtatagattggtagagagtaggtaatttttttttcgttttagtttagttttggaataggtagatatattttagggttaaatagacgtttttcgtacggggttttacggaagtttgagtaggcggggtaggaggggcggtatttgttgttttggtagtaaattgggggatttagtttgggtggaaggtatttaatttagatagttgtgtatatataatgtataatatatgattttttttaataaatgtaatgggagtttatttataacgcgttttttaagtatacgtggtaatgcgttgttgggttattttaattattttaggtatcgtttttttttttatgtttttattatttttttttatttatattaatattttacgttttgaacgcgcgtttattaatattttttttttttttattttttttgggatttttgattaaagcgcggttttttttttagttttagcgaggcgttttgtagtttggtacgcgcgtggcgtggcggtgggcgcgtagtgcgttttcggtgtggagggtagttgtttcgtttgcgatgatttatatttataggataaggatgcggtttgttaaataatattgttacggaggagtagtagagaaagggagagggtttgagagggagtaaaagaaaatggtaggcgcgcgtagttaatttatgcggtttttttattttgtttatattttagagttagagtgttcggttgttcggttgagttttttttttattttttttattttttttattttttttataagcgtttttttcgggtttttaaagtagagggcgtgggggaaaagaaaaaagattttttttcgttaattttcgtttatcggttttttataatgcgagggtttggacggttgaggattttcgagttgtgttgttcgcggtcgttatcgtcgggtttcggtcgtttttggttttttttttgtttcgagaagggtagggttttttagaggtttggcgggaaaaagaacggagggagggatcgcgttgagtataaaagtcggttttcggggttttatttaattcgttgtagtaattttagtgagaggtagagggagcgagcgggcggtcggttagggtggaagagtcgggcgagtagagttgcgttgcgggcgttttgggaagggagattcggagcgaatagggggtttcgtttttggtttagatttttcgttgattttttaggtagcggttcgtaatttttgtcgtatttacgaaattttgtttatagtagcgggcggatattttgtattggaattgataatattcgattaaggacgcgattttttcgacgcggggaggttattttgtttatttggggatattttttcgtcgttgttaggattcgtttttttgaaaggttttttttgtagttgtttagatattgaatttttttcgggaagtggaaaattaggtaagtatcgaagtttatttgttttttaatttatttttttattagtttaattttgagatgagtcgaatgtttaaatagggtgtttttttttttaattttgcgttattgatatttttttcggggtgggggttattttagaattggatcggggtatagtgatttgttaagatgggggaggagaagatagagggaaaacgggaatggtttttacgattattttttcgagatttttgttttatgaatatatttacgtcgattttcggtcggtcggatatttttattttattgtgttaattgttttttgggttttggggggcggggggttgttttgcggtgggtagaaagttttttgtattttgagttttttggagaagggatcgtatatcgtttgtgtgagttagatcgtttcgtaggcgttgatttgttttcgttttcgggagggtagttaaatttcgatttatcgtatttttgatagtcggagacggatattgcggcgcgtttcgttcgtttgttttcgcggcgattttaattcgttttgatttttttaagaagttgatatttggttttttaaaaagtaataaaataatttaaaatttgggtttttagaagtgttaggacgtggtgttgggtaggcgtaggtaggggaaaagggaggcgaggatgtgttcgatttttttgtaatcgttgatttggaaaaattagggcgaattttcgtatttagttttgatttttttgtcgcggtcgttttcgggtgttttcgcgttcgagatgcggaggaattgcgaggagcggggttttgggcggttttaaaatagttgttatttttggtggggtggtttcgggggaggtatcgtagcggggtttttggcgtagttgtattttcgtattgagtgcgaagggaggtgtttttattattatttgatattttttttgtatttatggaggggtgttaaagttcgcggttgagttcgttattttagtcggcgagagaaagaagaaaagttggtaaaaggagtgttggacgggggtagtattgggggtggggacgggggcggtggagagggaaggttgggaggggttgcggtgtcggcgggggtaggagagcgtttagggcgcgagtgggaatagtcgtagcggaggggtttcggcgcggagcggggtttacgtagtcgttttcgtttaggcgtttttcgtttttttttttaggtggcgtaaaattttgtgttttggattttggtaaattgtattttttatcgttatttttcgcggttttttaagggcgttagggtcgatttcgatttttttgtcgttgcggggtcgattttcgggttttgcgtttcgggttttcgggggagcgggggttcggcgggtattaagacgttggtttattaagtgcgttttcgagatagtaggggattgtttaaagggggtgaaagggtgttttttttatttttttattaagattatttagtcgttttaggggatagttttgtaaggggagaggttcgggattgtggcgcgtattgcgcgttgcgttaggttttcgtattaagatttttttaatttaagattgtttttcgttttgtgtgtttcgttttagtagtttttcgcgacgatgttttttaacgttagttttattaataggaattatgatttcgattacgattcggtgtagtcgtatttttattgcgacgaggaggagaatttttattagtagtagtagtagagcgaattgtagttttcggcgtttagcgaggatatttggaagaaattcgagttgttgtttatttcgtttttgttttttagtcgtcgtttcgggttttgttcgtttttttacgttgcggttatattttttttttttcggggagataacgacggcggtggcgggagtttttttacggtcgattagttggagatggtgatcgagttgttgggaggagatatggtgaattagagttttatttgcgattcggacgacgagatttttattaaaaatattattatttaggattgtatgtggagcggtttttcggtcgtcgttaagttcgttttagagaagttggttttttattaggttgcgcgtaaagatagcggtagttcgaatttcgttcgcggttatagcgtttgttttatttttagtttgtatttgtaggatttgagcgtcgtcgttttagagtgtatcgatttttcggtggtttttttttatttttttaacgatagtagttcgtttaagttttgcgtttcgtaagattttagcgtttttttttcgttttcggattttttgtttttttcgacggagtttttttcgtagggtagtttcgagtttttggtgttttatgaggagatatcgtttattattagtagcgattttggtaagcgaagttcgtttaggtttgttaaaagtgggcggttggatattttttttatttttattggtagtttatttaacgggttatttttattaggaaggagagatagtagatttggagagatttgggagtttattatttttgaaattttgggttttagcgtttttttttattttttttttttagattgtttatgtttgtagttttttttttcgtttgttttttattttttaggaattttatttaggtttttaaattttttggtttattttataatttaatttatttttttttatttttcgttaatattttaattgttttggggcggggtggtagggagtgtatgaatgaggataagagaggattgatttttgagagtgaatgaattgttttttttttaattttcgagaagtggtgggatttaatgaattatttataaaaatgaggggttgtgtttagaggttaggtagggtttgtttgagtgcgggagttagtgaattgttttaagagtgggtgggttgaggagttgggatttttttagtttattttgaatattgaaaagtaaatttttgttaaagttggatttttttttttttttattttttttttcgtttttttggatttttggtaaaattgtaattttttttttttttattttttatttttagtaaaatagggagttgttaaagttatattaagtaatttgtagttattatttgtaatatttgaagtgtttttggtaaagttttttaaaaataggaggtgtttgggaatgtgttttgttttgggtgtgtttaaagttttattaagttttaggtaagaattggtattaatgttttattttgggaagttgtattttttttgtttatgttataatttagttgtttttttttttatgagatttttatttttatggtgagaggagtaagggtggttggttagattggttttttttttttttttttttttttttaagacggagttttattttgttattaggttggagtgtagtggcgtaattaatttttaattttttggtttaagagatttttttgttttagttttttaagtagttgggattataggtgtatattattatgttaggttaatttttgtaattttagtagagatggggttttatcgtgttggttaggatggttttttttgattttacgattcgtttatttcggttttttaaagtgttgggattataggtgtgagttagggtattaggtttagatgtggttttttggggagataattttgtttagagatttttttaacgtatttatgttttgtatttgtatagtattaatttggtaattgattattttaatgtaattttgttaaaggagtgatttttatttttttttttaaagaggaggaataagaagatgaggaagaaatcgatgttgtttttgtggaaaagaggtaggtttttggtaaaaggttagagtttggattattttttgttggaggttatagtaaatttttttatagtttattggtttttaagaggtgttacgtttttatatattagtataattacgtagcgtttttttttattcggaaggattattttgttgttaagagggttaagttggatagtgttagagttttgagatagattagtaataatcgaaaatgtattagttttaggttttcggatatcgaggagaatgttaagaggcgaatatataacgttttggagcgttagaggaggaacgagttaaaacggagtttttttgttttgcgtgattagatttcggagttggaaaataatgaaaaggtttttaaggtagttatttttaaaaaagttatagtatatattttgttcgtttaagtagaggagtaaaagtttatttttgaagaggatttgttgcggaaacgacgagaatagttgaaatataaatttgaatagttacggaatttttgtgcgtaaggaaaagtaaggaaaacgattttttttaatagaaatgttttgagtaatcgtttatgaatttgttttaaatgtatgattaaatgtaattttataattttggttgagttttgagattgaaagatttagttataatgtaaattgttttaaattggattttgggtataaaagaatttttttatgtttattattttttttttttttttaatagatttgtatttaagaattgtttttaaaaaattttaagatttatataatgtttttttgtaaatattgttattaaatgtaaataattttaataaaacgtttatagtagttatatagaattttaattttagtatatagtatttagtattataggtattataaattttaattttttttatttaagtatattttgttttttaaagttgatttttttttattgtttttagaaaaaataaaataattggtaaatatattattgagttaaattttaagttgtgaatgttttgtttcgtttttttttttttttaattattattatttttgtttgtttttattaattgtttttttagagggtggttttaagaaaggtaagagtttttttttgttgaaatgggtttgggggttttaaggtttttaagtttttggaggttttaagatgttttttggagattatgataatagttagagttgatagttagaaggaatggtagaaggtaggtgagaaggtgagaggtaggtaaaggagatataagaggttaaaggtagtagttaagtatataaagaggtataaggattggggagttgggaggaaggtgaggaagaaatttttgttattttagttaattagtgttagttttttgtttattttaaatttaggaatt

SEQ ID NO: 118 - DNA, 8056 bp, Artificial Sequence
  chemically treated genomic DNA (Homo sapiens)
aatttttgggtttggagtgagtaggggattggtattggttaattaaagtaataggagttttttttttattttttttttaattttttagtttttatgtttttttgtgtatttaattgttatttttgattttttgtattttttttgtttattttttatttttttatttgttttttgttattttttttaattgttaattttggttgttattatagtttttaggaagtattttagaatttttaagaatttaaagattttaaggtttttagatttattttaatagaggaaaatttttgttttttttaagattattttttgaaggggtaattgatgaaaataaatagggatggtggtggttgggagggggaagaaacgaaataaaatatttataatttaagatttggtttaatgatatatttgttagttattttattttttttaaaaataatagaaaaaaattaattttaaaaagtaaaatgtatttaaataaaaaaaattagggtttatagtatttataatattaggtattatatattaggattgaaattttgtgtaattgttataaacgttttattaaagttatttatatttaatggtaatatttatagagaaatattgtgtaaattttaaaattttttaaaaataatttttaaatataaatttgttaaagaaaaaaaaaagatggtaagtataaaaaagtttttttatgtttaaagtttaatttgaggtagtttatattatggttaaattttttagttttaagatttagttaaggttgtgaggttgtatttgattatgtatttgaaataagtttataggcgattgtttaggatatttttgttagaaggaatcgttttttttatttttttttacgtataagagtttcgtagttgtttaagtttgtgttttaattgttttcgtcgttttcgtaataagttttttttagaaatgagtttttgtttttttgtttggacggataggatgtatgttgtggtttttttaaggataattattttgggggtttttttattgttttttaatttcgggatttggttacgtagggtaaaaaagtttcgttttagttcgttttttttttggcgttttaagacgttgtgtgttcgttttttgatatttttttcggtgttcgaggatttggggttggtgtattttcggttgttgttgatttgttttaggattttgatattgtttaatttgatttttttggtagtaggatagttttttcgagtggagggaggcgttgcgtagttgtgttgatgtgtggagacgtggtattttttgaggattagtgggttgtgaggaggtttgttgtggtttttagtagaaggtgatttagattttgattttttgttaggagtttgttttttttttatagaaataatatcgattttttttttatttttttgttttttttttttaagaaaggaaatagaaattatttttttagtaaggttatattaaaataattaattattagattaatgttgtataaatataaggtatgaatacgttagaaaggtttttggataaaattatttttttaaagagttatatttaagtttggtgttttggtttatatttgtaattttagtattttgggaggtcgaggtgggcggatcgtgaggttaggagagattattttggttaatacgatgaaattttatttttattaaaattataaaaattagtttggtatggtggtgtgtatttgtagttttagttatttgggaggttgaggtaggagaattttttgaattagggggttggaggttgattgcgttattgtattttagtttagtgatagagtgagatttcgttttaaaaaaggaaaaaaaaaaaaaaagaattaatttagttagttatttttattttttttattatgaaggtaagagttttataaagggaaagatagttgggttatggtatggataagaaaagtgtaattttttaggataggatattgatgttaatttttatttaagatttaatgaggttttggatatatttaaagtaaagtatatttttaagtattttttatttttgagggattttattaagaatattttaggtgttgtaaatgatagttgtaaattgtttggtatgattttagtaattttttattttattggaaatgaaaaataaaaaaaaaaaaaattgtagttttgttaaaagtttaagagggcgggggaaggaataaaagaaaaaaaaagtttaattttggtaaggatttgttttttagtgtttaaaataggttgagaagattttagttttttagtttatttatttttgaggtagtttattggttttcgtatttaggtaggttttgtttagtttttaaatatagttttttatttttgtagatagtttattaaattttattatttttcggaagttaagagggaagtaatttatttatttttagagattaatttttttttatttttatttatatattttttgttatttcgttttagggtaattaaaatgttaacgggaggtaagaagaagtggattgagttgtaagataagttagaaggtttaaaaatttaaatgaaatttttgaggggtgggagataaacggggaggggggttgtaaatatgggtagtttaaggggaagggatgggaggaaacgttaaagtttaaggttttagaggtgatgagtttttaaatttttttagatttgttattttttttttttaataagagtggttcgttaaataagttgttaatgaaaatgggaaaggtatttagtcgtttatttttgataggtttgggcgggtttcgtttattagagtcgttgttggtggtgggcggtgtttttttatggagtattaggggttcggggttgttttgcggggaggatttcgtcgaggagagtagagaattcgaggacggagagaaggcgttggagttttgcgaggcgtaggatttgggcgagttgttgtcgttgagagggtaggggaagattatcgaggggtcgatgtattttgaggcggcggcgtttagattttgtaggtataagttggaggtggagtagacgttgtggtcgcgggcggggttcgggttgtcgttgtttttgcgcgtagtttggtaggaggttagtttttttgagacgagtttggcggcggtcgagaagtcgttttatatatagttttggatgatgatgtttttgatgaaggtttcgtcgttcgggtcgtagatgaaattttggtttattatgtttttttttagtagttcggttattatttttagttggtcggtcgtggagaagttttcgttatcgtcgtcgttgttttttcgaagggagaagggtgtgatcgtaacgtaggagggcgagtagagttcggagcggcggttaggggataggggcggggtgggtagtagttcgaattttttttagatattttcgttgggcgtcgggggttgtagttcgttttgttgttgttgttggtagaagttttttttttcgtcgtagtagaaatacggttgtatcgagtcgtagtcgaggttatagtttttgttggtgaagttaacgttgaggggtatcgtcgcgggaggttgttggagcggggtatataaagcgggaggtagttttgagttaaaggggttttggtgcggaaatttggcgtagcgcgtagtgcgcgttatagtttcgaatttttttttttgtagagttattttttaaagcggttgggtggttttggtgggggaataaagggagtatttttttattttttttggatagttttttgttatttcggagacgtatttagtgaattagcgttttggtattcgtcgagttttcgttttttcgggagttcggagcgtaaagttcgggagtcggtttcgtagcggtagaggaatcgaaatcggttttggcgtttttaagaagtcgcgggaggtggcggtgaggaatataatttgttaaaatttaaggtataaagttttgcgttatttgaaggagaaggcgaaaggcgtttgggcgaaagcggttgcgtgaatttcgtttcgcgtcggggttttttcgttgcggttgtttttattcgcgttttaggcgtttttttattttcgtcggtatcgtagttttttttaattttttttttttatcgttttcgtttttatttttagtattgttttcgtttaatattttttttgttagttttttttttttttttcgtcggttggagtggcgagtttagtcgcggattttaatatttttttataaatataaggggggtgttaaataataataggggtattttttttcgtatttaatacggagatgtaattgcgttagagatttcgttgcgatatttttttcggagttattttattaagggtagtagttgttttggaatcgtttagagtttcgtttttcgtagttttttcgtatttcgggcgcgaggatattcgagggcggtcgcggtaggggagttaggattgggtgcggagattcgttttggtttttttaagttaacgattgtaggagaatcggatatattttcgtttttttttttttttgtttgcgtttatttaatattacgttttaatatttttagagatttaggttttaaattgttttattgttttttaaaaagttaaatgttaattttttaaaagaattagggcgggttggaatcgtcgcggggataggcgggcgggacgcgtcgtagtgttcgttttcggttgttagaaatgcggtgagtcgagatttaattgttttttcggagacggggataagttagcgtttgcggagcgatttggtttatataggcgatatgcggttttttttttaaggagtttaagatgtaagggattttttgtttatcgtaaagtaatttttcgttttttaaaatttagagaataattaatataataaagtaggaatgttcgatcggtcgggagtcgacgtgaatatatttataaggtagaaatttcgaaaggataatcgtaaaaattattttcgttttttttttgttttttttttttttattttgataagttattgtatttcgatttaattttggaataatttttatttcgagaaaggtgttaataacgtaggattgggagaaaagatattttatttaggtattcgatttattttagaattaaattgataaaaaagtaaattaaaagataagtggatttcgatgtttatttggttttttatttttcgaaaaaaatttagtatttaagtagttgtaaggagagttttttagagaagcgggttttggtagcggcggggaagtgtttttaaatgggtagaatagttttttcgcgtcgggagagtcgcgtttttggtcgggtgttgttagttttagtgtaaagtgttcgttcgttgttatgggtaaagtttcgtggatgcggtaagggttgcggatcgttgtttgggggattagcgggaggtttgggttagaggcgaagttttttattcgtttcggatttttttttttaggacgttcgtagcgtagttttgttcgttcggtttttttattttagtcggtcgttcgttcgttttttttgttttttattggaattattatagcgagttagataaagtttcgaaaatcggtttttatatttagcgcgattttttttttcgttttttttttcgttaagtttttgagaagttttgtttttttcgaggtaggaggggagttagggacggtcggggttcggcggtggcggtcgcgagtagtatagttcgggggtttttagtcgtttagattttcgtattataaagggtcggtgggcggagattagcgagagaggattttttttttttttttttacgttttttgttttgggaattcgggaggggcgtttatggggagggtggggagggtggggaaggtggggaggagatttagtcgggtagtcgagtattttagttttaggatgtaaatagagtaagagagtcgtatgaattaattacgcgcgtttattatttttttttgtttttttttaaattttttttttttttttgttgttttttcgtagtagtattgtttgataaatcgtatttttgttttgtgagtataaattatcgtaggcggaatagttgttttttatatcgagaacgtattgcgcgtttatcgttacgttacgcgcgtattaggttgtagggcgtttcgttaaggttggggaaagggtcgcgttttgattaagagttttagggagagtggaggaaagaagggtattaatgggcgcgcgtttagagcgtgggatgttagtgtagatagggaggaatgatagaggtataaggaggaaaacgatgtttagaatgattaaaataatttagtaacgtattgttacgtatatttggagagcgcgttatgaataaatttttattgtatttgttggggggagttatgtattatgtattatgtatgtatagttatttggattggatattttttatttagattgagttttttaatttgttgttaaagtagtagatatcgttttttttgtttcgtttgtttaggttttcgtggggtttcgtgcgggaggcgtttgtttagttttgagatgtgtttgtttgttttagagttggattagggcgagagggaggttgtttgttttttgttagtttgtattttatcgttttatttttacgttttttatacggagtttttaattttttagttaggttttagaagagataaattttttttgcgttttgtggcgtcggtttgtaatagtttcgggttgtcgggtttgggagaaattaaaggtgttagacgggagaatatgggaggggtagggggtattcgaatcgcgggatcggattttttaaaaggggtaagtggagagtttgtggatcgagtcgggggagttagtagagatttttgtgaaaaaaatcgttaattttttttttttcggataaatcggacgtttaatttttttttaggttttttttttttttttattattggaaatgcggttatgtataaaaaatgtatcgattttgattaaagaagaggagaggagtattattttcgtgtttttttttgggggggggggagttttgagttaattaaaatttggttgttttttaggtattaattttttagtttattgatttataattttttttgaatattagtgaaagtgtattgtatgtaattcgtaaacgtgtatttatattttatttacgtttcgatttagttagttgtttagttttatatatgatttgtttgttttttgaaatgatttatatttaatatataatgtatattttttcgggattttttattttgtgttattttacggtatgaaaaataaaaaatattttttttatttttggttttttatttaaaggtattttaagtaaatttttttttttttttattatttttaaaagagaaaataattcgggggaaaggggtgcgtgtatagtatgtacgttgtttaagatgggttattattcgttgagtttgtagtttagcgtttaagtgttaagtgaatatagtagtttttaaattcgatgtattgtataatttagttttaaggattgtaaattatttttgtttttaggtttttgtcgtaaacgcggggagtaattaatcgttatgttggattttgttgtaaagcgttttttttttcgttttttttttgggtagtattcgcgtttaggtttgcgaaagtaaagtaagtgtgttttttattggtagtagagattatcgcgtttggatgttaacgagggcgggggttaggtgggggtaggagtaggagcgttcgaggtgtaaggtttttagcgggggaaggataggcggttttttaaaataagtttttagttatttttttgttatttttttaggttggttgtagaaggttcgaagaaagaggagttattggaggaaaaagtggtttagaggtgattatttaatcgtataagagatggtgaaaattaatttattattattgttaatgaatattattttatggagaatcggtaatggtaaacgtgaaataatttataagtatatagacgaaaaaaaaattttaataaattttaaaacggttaaataagtt

SEQ ID NO: 119 - DNA, 409 bp, Artificial Sequence
  chemically treated genomic DNA (Homo sapiens)
tttagagtgatatttttattttatgtttggttatttattttttttttgggaagagagtcgaggtggggtaagggatgtgtatttttttaaggagtgggagaattattttagcgaatgtttgtgttgttttagttttgtttataaagtttcgttatgtttatagatggttgcgtaatttattattttatttaatttttatgtattttttttgagggagtaagagttgttatagttaagtttaggttagtaaatatttattaagttgtaggtattgtagggtatagagatgaattcgatttagtttttgttttggaggtttgggaatttgtttaagattatttagtgagtagttgagttagggtttttaattaaagattttgggtttaggttttggtttgatgttaggttt

SEQ ID NO: 120 - DNA, 409 bp, Artificial Sequence
  chemically treated genomic DNA (Homo sapiens)
aggtttgatattagattagggtttgggtttagggtttttagttgagaattttagtttagttgtttattgagtgattttgagtaagtttttagatttttagggtagaagttaaatcggatttatttttatgttttgtagtatttgtaatttggtgaatatttattgatttaaatttggttgtaatagtttttatttttttagaggaggtatatgagagttaaatgaggtaatgaattgcgtagttatttgtaaatatgacgaggttttgtaaatagaattgggataatataaatattcgttagaataatttttttattttttgaaagagtatatattttttattttatttcggttttttttttagggggaggatgggtggttaaatataagatggagatgttattttaga

SEQ ID NO: 121 - DNA, 20 bp, Artificial Sequence
  DAPK1 detection primer
attaatattatgtaaagtga

SEQ ID NO: 122 - DNA, 20 bp, Artificial Sequence
  DAPK1 detection primer
cttacaaccattcacccaca

SEQ ID NO: 123 - DNA, 17 bp, Artificial Sequence
  DAPK1 detection oligonucleotide
aggaggacgaggtgatg

SEQ ID NO: 124 - DNA, 17 bp, Artificial Sequence
  DAPK1 detection oligonucleotide
aggaggatgaggtgatg

SEQ ID NO: 125 - DNA, 25 bp, Artificial Sequence
  TNFB detection primer
tttttgtttttgattgaaatagtag

SEQ ID NO: 126 - DNA, 20 bp, Artificial Sequence
  TNFB detection primer
aaaaaccccaaaataaacaa

SEQ ID NO: 127 - DNA, 18 bp, Artificial Sequence
  TNFB detection oligonucleotide
aggggtttcgtatagtag

SEQ ID NO: 128 - DNA, 18 bp, Artificial Sequence
  TNFB detection oligonucleotide
aggggttttgtatagtag

SEQ ID NO: 129 - DNA, 20 bp, Artificial Sequence
  CDK4 detection primer
ttttggtagttggttatatg

SEQ ID NO: 130 - DNA, 20 bp, Artificial Sequence
  CDK4 detection primer
aaaaataacacaataactca

SEQ ID NO: 131 - DNA, 18 bp, Artificial Sequence
  CDK4 detection oligonucleotide
gtatggggtcgtaggaat

SEQ ID NO: 132 - DNA, 18 bp, Artificial Sequence
  CDK4 detection oligonucleotide
gtatggggttgtaggaat

1. A nucleic acid comprising a sequence at least 18 bases in length of a segment of chemically pretreated genomic DNA according to one of the sequences taken from the group of Seq. ID No.1 to Seq. ID No.120 and sequences complementary thereto.

2. An oligomer, in particular an oligonucleotide or peptide nucleic acid (PNA)-oligomer, said oligomer comprising in each case at least one base sequence having a length of at least 9 nucleotides which hybridizes to or is identical to a chemically pretreated genomic DNA according to one of the Seq ID Nos 1 to 120 according to claim 1, and sequences complementary thereto.

3. The oligomer as recited in claim 2, wherein the base sequence includes at least one CpG dinucleotide.

4. The oligomer as recited in claim 2 characterized in that the cytosine of the CpG dinucleotide is located approximately in the middle third of the oligomer.

5. A set of oligomers, comprising at least two oligomers according to any of claims 2 to 4.

6. A set of oligomers as recited in claim 5, comprising oligomers for detecting the methylation state of all CpG dinucleotides within one of the sequences according to Seq. ID Nos. 1 through 120 according to claim 1, and sequences complementary thereto.

7. A set of at least two oligonucleotides as recited in claim 2, which can be used as primer oligonucleotides for the amplification of DNA sequences of one of Seq. ID 1 through Seq. ID 120 and sequences complementary thereto, and sequences complementary thereto and segments thereof.

8. A set of oligonucleotides as recited in claim 7, characterized in that at least one oligonucleotide is bound to a solid phase.

9. Use of a set of oligomer probes comprising at least ten of the oligomers according to any of claims 5 through 8 for detecting the cytosine methylation state and/or single nucleotide polymorphisms (SNPs) in a chemically pretreated genomic DNA according to claim 1.

10. A method for manufacturing an arrangement of different oligomers (array) fixed to a carrier material for analyzing diseases associated with the methylation state of the CpG dinucleotides of one of the Seq. ID 1 through Seq. ID 120 and sequences complementary thereto, wherein at least one oligomer according to any of the claims 2 through 4 is coupled to a solid phase.

11. An arrangement of different oligomers (array) obtainable according to claim 10.

12. An array of different oligonucleotide- and/or PNA-oligomer sequences as recited in claim 11, characterized in that these are arranged on a plane solid phase in the form of a rectangular or hexagonal lattice.

13. The array as recited in any of the claims 11 or 12, characterized in that the solid phase surface is composed of silicon, glass, polystyrene, aluminium, steel, iron, copper, nickel, silver, or gold.

14. A DNA- and/or PNA-array for analyzing diseases associated with the methylation state of genes, comprising at least one nucleic acid according to one of the preceeding claims.

15. A method for characterizing, classifying and/or differentiating oligodendroglioma, astrocytoma and oligoastrocytoma tumors, characterized in that the following steps are carried out:
obtaining a biological sample containing genomic DNA,
extracting the genomic DNA,
in a genomic DNA sample, cytosine bases which are unmethylated at the 5-position are converted, by chemical treatment, to uracil or another base which is dissimilar to cytosine in terms of hybridization behavior,
fragments of the chemically pretreated genomic DNA are amplified using sets of primer oligonucleotides according to claim 7 or 8 and a polymerase, the amplificates carrying a detectable label;
amplificates are hybridized to a set of oligonucleotides and/or PNA probes according to the claims 5 and 6, or else to an array according to one of the claims 12 through 15;
the hybridized amplificates are subsequently detected.

16. A method for characterizing, classifying and/or differentiating oligodendroglioma, astrocytoma and oligoastrocytoma tumors, characterized in that the following steps are carried out:
obtaining a biological sample containing genomic DNA
extracting the genomic DNA
in a genomic DNA sample, cytosine bases which are unmethylated at the 5-position are converted, by chemical treatment, to uracil or another base which is dissimilar to cytosine in terms of hybridization behavior;
fragments of the chemically pretreated genomic DNA are amplified using sets of primer oligonucleotides according to claim 7 or 8 and a polymerase;
analysis of the sequence of the amplified DNA and determination of the methylation status of one or more cytosine positions within the genomic sample, prior to chemical treatment by reference to one or more data sets.

17. The method as recited in claims 15 or 16, characterized in that the amplification step preferentially amplifies DNA which is of particularly interest in oligodendroglioma, astrocytoma and/or oligoastrocytoma cells, based on the specific genomic methylation status of oligodendroglioma, astrocytoma and/or oligoastrocytoma cells, as opposed to background DNA.

18. The method as recited in claims 15 through 17, characterized in that the chemical treatment is carried out by means of a solution of a bisulfite, hydrogen sulfite or disulfite.

19. The method as recited in one of the claims 15 through 18, characterized in that more than ten different fragments having a length of 100-2000 base pairs are amplified.

20. The method as recited in one of the claims 15 through 19, characterized in that the amplification of several DNA segments is carried out in one reaction vessel.

21. The method as recited in one of the claims 15 through 20, characterized in that the polymerase is a heat-resistant DNA polymerase.

22. The method as recited in claim 21, characterized in that the amplification is carried out by means of the polymerase chain reaction (PCR).

23. The method as recited in one of the claims 15 through 22, characterized in that the labels of the amplificates are fluorescence labels.

24. The method as recited in one of the claims 15 through 22, characterized in that the labels of the amplificates are radionuclides.

25. The method as recited in one of the claims 15 through 22, characterized in that the labels of the amplificates are detachable molecule fragments having a typical mass which are detected in a mass spectrometer.

26. The method as recited in one of the claims 15 through 22, characterized in that the amplificates or fragments of the amplificates are detected in the mass spectrometer.

27. The method as recited in one of the claims 25 and/or 26, characterized in that the produced fragments have a single positive or negative net charge for better detectability in the mass spectrometer

28. The method as recited in one of the claims 25 through 27, characterized in that detection is carried out and visualized by means of matrix assisted laser desorption/ionization mass spectrometry (MALDI) or using electron spray mass spectrometry (ESI).

29. The method as recited in one of the claims 15 through 28, characterized in that the genomic DNA is obtained from cells or cellular components which contain DNA, sources of DNA comprising, for example, cell lines, histological slides, biopsies, cerebrospinal fluid, lymphatic fluid, tissue embedded in paraffin; for example, brain or lymphatic tissue and all possible combinations thereof.

30. A kit comprising a bisulfite (=disulfite, hydrogen sulfite) reagent as well as oligonucleotides and/or PNA-oligomers according to one of the claims 2 through 4.

31. The use of a nucleic acid according to claim 1, of an oligonucleotide or PNA-oligomer according to one of the claims 2 through 4, of a kit according to claim 30, of an array according to one of the claims 11 through 14, of a set of oligonucleotides according to one of claims 5 through 8 for the treatment of tumors and cancer, in particular gliomas, astrocytomas and oligodendromas.

32. The use of a nucleic acid according to claim 1, of an oligonucleotide or PNA-oligomer according to one of the claims 2 through 4, of a kit according to claim 30, of an array according to one of the claims 11 through 14, of a set of oligonucleotides according to one of claims 5 through 8 for the therapy of tumours and cancer, in particular gliomas, astrocytomas and oligodendromas.
